(19) United States
(12) Patent Application Publication
(10) Pub. No.: US 2023/0399657 A1
(43) Pub. Date: Dec. 14, 2023

(54) LIVER DE-TARGETED RECOMBINANT AAV CAPSID PROTEINS

(71) Applicant: Homology Medicines, Inc., Bedford, MA (US)

(72) Inventors: Laura Jane SMITH, Bedford, MA (US); Laura Van Lieshout, Bedford, MA (US); Lindsay Schulman, Bedford, MA (US); Omar Francone, Bedford, MA (US)

(21) Appl. No.: 18/319,052

(22) Filed: May 17, 2023

Related U.S. Application Data
(60) Provisional application No. 63/449,772, filed on Mar. 3, 2023.
(60) Provisional application No. 63/365,989, filed on Jun. 7, 2022.
(60) Provisional application No. 63/364,839, filed on May 17, 2022.

(51) Int. Cl. C12N 15/86; C07K 14/005

(52) U.S. Cl. CPC C12N 15/86; C07K 14/005; C12N 2750/14152; C12N 2750/14171; C12N 2750/14122; C12N 2750/14145; C12N 2750/14143

(57) ABSTRACT

Provided herein are recombinant adeno-associated virus (AAV) capsid proteins, compositions (e.g., rAAV) comprising the capsid proteins, nucleic acids encoding the capsid proteins, and methods of making and using the capsid proteins.

### RELATED APPLICATIONS

[0001] This application claims priority to U.S. Provisional Patent Application Ser. Nos. 63/364,839, filed May 17, 2022; 63/365,989, filed Jun. 7, 2022; and 63/449,772, filed Mar. 3, 2023, the entire disclosures of which are hereby incorporated herein by reference.

### SEQUENCE LISTING

[0002] This application contains a sequence listing which has been submitted electronically in ST.26 format and is hereby incorporated by reference in its entirety (said ST.26 copy, created on May 16, 2023, is named “199936_seglist.xml” and is 2,064,607 bytes in size).

### BACKGROUND

[0003] Adeno-associated viruses (AAVs) are small, non-enveloped viruses of the genus Dependoviruses within the family Parvoviridae. They package a single-stranded DNA genome that is approximately 4.7 kb in length, consisting of rep and cap genes flanked by inverted terminal repeat regions (ITRs). AAVs are an ideal delivery system for gene therapy because AAV infection of cells in culture is non-cytopathic, and natural infection of humans and other animals is silent. Further, because the signals directing AAV replication, genome encapsidation and integration are contained within the inverted terminal repeats (ITRs) of the AAV genome, essentially all of the internal 4.7 kb of the AAV genome (encoding the replication and structural capsid proteins, rep-cap) can be replaced with heterologous nucleic acid sequences, such as a transgene for effecting gene therapy.

[0004] Recombinant AAV (rAAV) gene therapy vectors typically consist of a recombinant AAV genome comprising a gene therapy transgene, packaged within an AAV capsid. The AAV capsid, which is formed by an assembly of 60 AAV capsid proteins, interacts with the cell surface of target cells and determines the tropism and transduction efficiency of rAAV. For tissue-specific genetic diseases, it desirable to have rAAVs that could specifically and efficiently target tissues in need of gene therapy, while at the same time de-target certain tissues.

[0005] Accordingly, there is a need in the art for tissue-specific AAV capsids for use in gene therapy applications.

### SUMMARY

[0006] Provided herein are recombinant adeno-associated virus (AAV) capsid proteins, compositions (e.g., rAAV) comprising the capsid proteins, nucleic acids encoding the capsid proteins, and methods of making and using the capsid proteins. The recombinant AAV capsid proteins provided herein are engineered to comprise non-wild type amino acids at positions corresponding to amino acid positions 346, 501, 505, and/or 706 of SEQ ID NO: 14. Also provided are recombinant AAV capsid proteins wherein the amino acid in the capsid protein corresponding to amino acid position 346 of SEQ ID NO: 14 is alanine; the amino acid in the capsid protein corresponding to amino acid position 501 of SEQ ID NO: 14 is isoleucine; the amino acid in the capsid protein corresponding to amino acid position 505 of SEQ ID NO: 14 is arginine; and/or the amino acid in the capsid protein corresponding to amino acid position 706 of SEQ ID NO: 14 is cysteine, and wherein the capsid protein does not comprise the amino acid sequence of amino acids 203-736 of SEQ ID NOs: 11-15. These recombinant AAV capsid proteins demonstrate reduced transduction of liver cells compared to the parental AAV capsid proteins. These recombinant AAV capsid proteins also result in increased expression of payload in transduced cells.

[0007] Accordingly, in one aspect, the instant disclosure provides a recombinant adeno-associated virus (AAV) capsid protein, wherein the amino acid in the capsid protein corresponding to amino acid positions 346, 501, 505, and/or 706 of SEQ ID NO: 14 is not the wild type amino acid.

[0008] In one aspect, the instant disclosure provides a recombinant adeno-associated virus (AAV) capsid protein, wherein: the amino acid in the capsid protein corresponding to amino acid position 346 of SEQ ID NO: 14 is alanine; the amino acid in the capsid protein corresponding to amino acid position 501 of SEQ ID NO: 14 is isoleucine; the amino acid in the capsid protein corresponding to amino acid position 505 of SEQ ID NO: 14 is arginine; and/or the amino acid in the capsid protein corresponding to amino acid position 706 of SEQ ID NO: 14 is cysteine, and wherein the capsid protein does not comprise the amino acid sequence of amino acids 203-736 of SEQ ID NOs: 11-15.

[0009] In certain embodiments, the amino acid in the capsid protein corresponding to amino acid position 501 of SEQ ID NO: 14 is isoleucine, and the amino acid in the capsid protein corresponding to amino acid position 505 of SEQ ID NO: 14 is arginine. In certain embodiments, the amino acid in the capsid protein corresponding to amino acid position 501 of SEQ ID NO: 14 is isoleucine, and the amino acid in the capsid protein corresponding to amino acid position 706 of SEQ ID NO: 14 is cysteine. In certain embodiments, the amino acid in the capsid protein corresponding to amino acid position 505 of SEQ ID NO: 14 is arginine, and the amino acid in the capsid protein corresponding to amino acid position 706 of SEQ ID NO: 14 is cysteine. In certain embodiments, the amino acid in the capsid protein corresponding to amino acid position 501 of SEQ ID NO: 14 is isoleucine, the amino acid in the capsid protein corresponding to amino acid position 505 of SEQ ID NO: 14 is arginine, and the amino acid in the capsid protein corresponding to amino acid position 706 of SEQ ID NO: 14 is cysteine. In certain embodiments, the amino acid in the capsid protein corresponding to amino acid position 346 of SEQ ID NO: 14 is alanine, the amino acid in the capsid protein corresponding to amino acid position 501 of SEQ ID NO: 14 is isoleucine, and the amino acid in the capsid protein corresponding to amino acid position 505 of SEQ ID NO: 14 is arginine. In certain embodiments, the amino acid in the capsid protein corresponding to amino acid position 346 of SEQ ID NO: 14 is alanine, the amino acid in the capsid protein corresponding to amino acid position 501 of SEQ ID NO: 14 is isoleucine, and the amino acid in the capsid protein corresponding to amino acid position 706 of SEQ ID NO: 14 is cysteine. In certain embodiments, the amino acid in the capsid protein corresponding to amino acid position 346 of SEQ ID NO: 14 is alanine, the amino acid in the capsid protein corresponding to amino acid position 505 of SEQ ID NO: 14 is arginine, and the amino acid in the capsid protein corresponding to amino acid position 706 of SEQ ID NO: 14 is cysteine. In certain embodiments, the amino acid in the capsid protein corresponding to amino acid position 346 of SEQ ID NO: 14 is alanine, the amino acid in the capsid protein corresponding to amino acid position 501 of SEQ ID NO: 14 is isoleucine, the amino acid in the capsid protein corresponding to amino acid position 505 of SEQ ID NO: 14 is arginine, and the amino acid in the capsid protein corresponding to amino acid position 706 of SEQ ID NO: 14 is cysteine.

[0010] In certain embodiments, the recombinant AAV capsid protein is a variant of a clade A, clade B, clade C, clade D, clade E, clade F, clade G, clade H, clade I, AAVgo.1, AAV3, AAV4, AAV10, AAV11, AAV12, rh.32, rh32.33, rh.33, rh.34, BAAV, or AAV5 capsid protein.

[0011] In certain embodiments, the recombinant AAV capsid protein comprises an amino acid sequence that is 95% identical to any one of the amino acid sequences of SEQ ID NOs: 1-30. In certain embodiments, the recombinant AAV capsid protein comprises any one of the amino acid sequences of SEQ ID NOs: 31-411 and 453-1304.

[0012] In one aspect, the instant disclosure provides an isolated polynucleotide encoding a recombinant AAV capsid protein as described herein. In certain embodiments, a vector comprises the polynucleotide. In certain embodiments, the vector is a plasmid or a viral vector. In certain embodiments, the viral vector is a retrovirus vector, a herpes virus vector, a baculovirus vector, or an adenovirus vector. In certain embodiments, the vector is an expression vector.

[0013] In one aspect, the instant disclosure provides a recombinant cell comprising a polynucleotides or vector as described herein.

[0014] In one aspect, the instant disclosure provides a method of producing a recombinant AAV capsid protein, the method comprising culturing the recombinant cell under conditions where the polynucleotide is expressed, and the capsid protein is produced.

[0015] In one aspect, the instant disclosure provides a recombinant adeno-associated virus (rAAV) comprising: (a) a capsid comprising one or more of the recombinant AAV capsid protein of any one of claims 1-13; and (b) an rAAV genome.

[0016] In certain embodiments, the rAAV genome comprises a transgene. In certain embodiments, the transgene encodes a polypeptide. In certain embodiments, the transgene encodes a miRNA, shRNA, siRNA, antisense RNA, gRNA, antagomir, miRNA sponge, RNA aptazyme, RNA aptamer, lncRNA, ribozyme, or mRNA. In certain embodiments, the transgene is operably linked to a transcriptional regulatory element.

[0017] In certain embodiments, the rAAV genome comprises an editing genome.

[0018] In one aspect, the instant disclosure provides a method for transducing a cell, the method comprising contacting the cell with an rAAV described herein under conditions whereby the cell is transduced.

[0019] In one aspect, the instant disclosure provides a method for delivering a transgene in a cell, the method comprising contacting the cell with an rAAV described herein under conditions whereby the cell is transduced and the transgene is expressed.

[0020] In one aspect, the instant disclosure provides a method for editing a target locus in a genome of a cell, the method comprising contacting an rAAV described herein (e.g., comprising an rAAV genome comprising an editing genome) under conditions whereby the cell is transduced and the target locus is edited.

[0021] In certain embodiments, the cell is in a subject and the rAAV is administered to the subject. In certain embodiments, the rAAV is administered to the subject intravenously, intraperitoneally, subcutaneously, intramuscularly, intrathecally, or intradermally. In certain embodiments, the subject is a human subject.

[0022] In one aspect, the instant disclosure provides a packaging system for preparation of an rAAV, wherein the packaging system comprises: (a) a first nucleotide sequence encoding one or more AAV Rep proteins; (b) a second nucleotide sequence encoding the recombinant AAV capsid protein of any one of claims 1-13; and (c) a third nucleotide sequence comprising an rAAV genome sequence.

[0023] In certain embodiments, the packaging system comprises a first vector comprising the first nucleotide sequence and the second nucleotide sequence, and a second vector comprising the third nucleotide sequence. In certain embodiments, the packaging system further comprises a fourth nucleotide sequence comprising one or more helper virus genes, optionally wherein the fourth nucleotide sequence is comprised within a third vector. In certain embodiments, the fourth nucleotide sequence comprises one or more genes from a virus selected from the group consisting of adenovirus, herpesvirus, vaccinia virus, and cytomegalovirus (CMV). In certain embodiments, the first vector, second vector, and/or the third vector is a plasmid.

[0024] In certain embodiments, the packaging system comprises a first vector comprising the first nucleotide sequence, the second nucleotide sequence, and the third nucleotide sequence. In certain embodiments, the packaging system further comprises a fourth nucleotide sequence comprising one or more helper virus genes, optionally wherein the fourth nucleotide sequence is comprised within a second vector. In certain embodiments, the fourth nucleotide sequence comprises one or more genes from a virus selected from the group consisting of adenovirus, herpesvirus, vaccinia virus, and cytomegalovirus (CMV). In certain embodiments, the first vector and/or second vector is a plasmid.

[0025] In one aspect, the instant disclosure provides a method for recombinant preparation of an rAAV, the method comprising introducing a packaging system described herein into a cell under conditions whereby the rAAV is produced.

[0026] In one aspect, the instant disclosure provides an rAAV described herein for use in medicine, for use as therapy, or for use as a medicament.

### BRIEF DESCRIPTION OF THE DRAWINGS

[0027] FIG. 1 is an alignment of amino acid sequences of capsid proteins of various serotypes. From top to bottom: AAV1 (SEQ ID NO: 16), AAV2 (SEQ ID NO: 17), AAV8 (SEQ ID NO: 21), AAV5 (SEQ ID NO: 19), AAV6 (SEQ ID NO: 20), AAV3B (SEQ ID NO: 18), AAVhu.32 (SEQ ID NO: 23), AAVhu.37 (SEQ ID NO: 24), AAV-DJ (SEQ ID NO: 26), AAVrh.74 (SEQ ID NO: 25), AAV Anc80L65 (SEQ ID NO: 27), AAV Oligo100 (SEQ ID NO: 28), AAV9 (SEQ ID NO: 22), AAV LK03 (SEQ ID NO: 30), AAVrh.10 (SEQ ID NO: 29), AAVHSC16 (SEQ ID NO: 14).

[0028] FIGS. 2A-2D is a schematic showing cell surface glycosidic chains associated with CHO cell mutants (FIG. 2A) and graphs showing the binding and transduction of AAVHSCs in Lec2 cells with terminally exposed galactose (FIGS. 2B-2D). FIG. 2B is a graph showing vector genomes bound to cell surface of Pro5 and Lec2 cells at time of transduction. FIG. 2C is a graph showing GFP expression at 24 hours. FIG. 2D is a graph showing the fold change in cell surface binding between Lec2 and Pro5 cells. Statistical analysis was performed using a two-way analysis of variance (ANOVA). ns indicates no statistical significance and **** indicates statistical significance at p<0.0001. All transductions were performed with biological triplicates and all molecular analysis was performed with technical triplicates.

[0029] FIGS. 3A-3B are graphs showing terminal galactose binding on AAVHSC16, AAVHSC15, and AAVHSC15 variants. FIG. 3A is a graph showing cellular surface bound vector genomes. FIG. 3B is a graph showing GFP expression at 24 hours. All vectors were tested on all CHO cell lines, and lack of visible bars indicate little to no surface bound VGs or GFP expression from transduction. Statistical analysis was performed using a two-way analysis of variance (ANOVA). ns indicates no statistical significance, * indicates statistical significance at p<0.05, ** indicates statistical significance at p<0.01, and **** indicates statistical significance at p<0.0001. All transductions were performed with biological triplicates and all molecular analysis was performed with technical triplicates.

[0030] FIGS. 4A-4B are graphs showing the effect of all naturally occurring unique residues on AAVHSC15 and AAVHSC16 on the binding and expression profile in CHO cells. FIG. 4A is a graph showing cellular surface bound vector genomes. FIG. 4B is a graph showing GFP expression at 24 hours. All vectors were tested on all CHO cell lines and lack of visible bars indicate little to no surface bound VGs or GFP expression from transduction. Statistical analysis was performed using a two-way analysis of variance (ANOVA). ns indicates no statistical significance, and **** indicates statistical significance at p<0.0001. All transductions were performed with biological triplicates and all molecular analysis was performed with technical triplicates.

[0031] FIGS. 5A-5B are graphs showing that the effect of the amino acid at residue 501 on overall binding of AAVHSC16. FIG. 5A is a graph showing cellular surface bound vector genomes. FIG. 5B is a graph showing GFP expression at 24 hours. All vectors were tested on all CHO cell lines and lack of visible bars indicate little to no surface bound VGs or GFP expression from transduction.

[0032] FIGS. 6A-6E are graphs showing the biodistribution of AAV2, AAV9, AAVHSC15, AAVHSC16, AAVHSC15 F501I, and/or AAVHSC15 Y706C. FIG. 6A is a graph showing total body transgene expression as determined by whole body bioluminescence imaging. FIGS. 6B and 6C are graphs showing tissue-specific transgene expression determined by tissue-specific bioluminescence at time of harvest for mice injected at the 1×10¹³ or 1×10¹⁴ vg/kg dose, respectively. In FIG. 6B, the bars indicate, from left to right for each tissue, tissue-specific transgene expression in mice injected with AAV2, AAV9, AAVHSC15, AAVHSC16, AAVHSC15 F501I, and AAVHSC15 Y706C. In FIG. 6C, the bars indicate, from left to right for each tissue, tissue-specific transgene expression in mice injected with AAV2, AAV9, AAVHSC15, AAVHSC16, and AAVHSC15 F501I. FIGS. 6D and 6E are graphs showing tissue-specific vgs as determined by ddPCR for mice injected at the 1×10¹³ or 1×10¹⁴ vg/kg dose, respectively. In FIG. 6D, the bars indicate, from left to right for each tissue, tissue-specific transgene expression in mice injected with AAV2, AAV9, AAVHSC15, AAVHSC16, AAVHSC15 F501I, and AAVHSC15 Y706C. In FIG. 6E, the bars indicate, from left to right for each tissue, tissue-specific transgene expression in mice injected with AAV2, AAV9, AAVHSC15, AAVHSC16, and AAVHSC15 F501I. Statistical analysis was determined by two-way ANOVA. ns indicates no statistical significance, * indicates statistical significance at p<0.05, ** indicates statistical significance at p<0.01, and *** indicates statistical significance at p<0.001. N=3-5 animals per group.

[0033] FIG. 7 is a graph showing the transduction of AAV2, AAV9, AAVHSC15, AAVHSC16, AAVHSC15 F501I, and/or AAVHSC15 Y706C in various tissues. FIG. 7 is a graph showing vector genomes in specified tissues. Only significant differences in transduction by vgs were observed in the heart at this dose, statistical analysis performed by two-way ANOVA. N=3 animals per group. In FIG. 7, the bars indicate, from left to right for each tissue, vector genomes per allele in tissues of mice injected with AAV2, AAV9, AAVHSC15, AAVHSC16, AAVHSC15 F501I, and AAVHSC15 Y706C.

[0034] FIGS. 8A-8G are graphs showing the biodistribution of AAVHSC16 in NHP in vivo and the effect on ALT and AST levels after high dose IV injection of AAVHSC16. FIG. 8A is a graph showing vector genome measurements from tissue lysates. FIG. 8B is a graph showing ALT levels in NHPs dosed at 7×10¹³ vg/kg with AAVHSC16 scCBA.eGFP vector or vehicle assessed prior to dosing followed by 1 and 2 weeks post dosing. FIG. 8C is a graph showing AST levels in NHPs dosed at 7×10¹³ vg/kg with AAVHSC16 scCBA.eGFP vector or vehicle assessed prior to dosing followed by 1 and 2 weeks post dosing. FIG. 8D is a graph showing ALT and AST levels in NHPs dosed at 1×10¹⁴ vg/kg with AAVHSC16 ssDNG.PAH vector assessed prior to dosing followed by 3, 14, and 28 days post dosing. FIG. 8E is a graph showing ALT levels in NHPs dosed at 4.2×10¹³ to 7×10¹³ vg/kg with AAVHSC8, AAVHSC16, and AAVHSC17 scCBA.eGFP vector or vehicle were assessed at 2 weeks post dosing. FIG. 8F is a graph showing AST levels in NHPs dosed at 4.2×10¹³ to 7×10¹³ vg/kg with AAVHSC8, AAVHSC16, and AAVHSC17 scCBA.eGFP vector or vehicle were assessed at 2 weeks post dosing. FIG. 8G is a graph showing ALT and AST levels in NHPs dosed at 1×10¹⁴ vg/kg with AAV9, AAVHSC8, AAVHSC16, and AAVHSC17 ssDNG.PAH vector assessed at 3 days post dosing. Statistical analysis was determined by one-way ANOVA. ns indicates no statistical significance, and ****=p<0.0001. N=2 animals per group.

[0035] FIGS. 9A-9B are graphs showing the whole blood and serum clearance of mice administered AAVHSC15 and AAVHSC16. FIG. 9A is a graph showing vector genomes quantified in whole blood by qPCR of mice administered AAVHSC15, AAVHSC16, AAVHSC15-F501I, and AAVHSC16-Y706C. FIG. 9B is a graph showing vector genomes quantified in whole blood and serum by qPCR of mice administered AAVHSC15, AAVHSC16 scCBA-GFP vectors. B6 albino mice were serial bled (2 min, 30 min, 1 hr, 3 hr, 8 hr, 24 hr, and 48 hr).

[0036] FIG. 10 is a graph showing the transduction of indicated vectors in heart, liver, gastrocnemius, brain, and spinal cord cells. In FIG. 10, the bars indicate, from left to right for each tissue, vector genomes per allele in tissues of mice injected with AAVHSC15, AAVHSC7, AAVHSC7 G505R, AAVHSC8, and AAVHSC8 G505R.

[0037] FIG. 11 is a graph showing the transduction of indicated vectors in heart, liver, gastrocnemius, brain, and spinal cord cells. In FIG. 11, the bars indicate, from left to right for each tissue, vector genomes per allele in tissues of mice injected with AAVHSC15, AAVHSC16 T346A, AAVHSC16 I501F, AAVHSC16, AAVHSC16 I501YB, and AAVHSC16 I501W.

[0038] FIGS. 12A-12C are graphs showing the transduction of indicated vectors in heart and liver cells. Transduction efficiency was measured as a function of vector genomes quantified in transduced rat H9C2 cells (FIG. 12A), human Ac16 cells (FIG. 12B), and primary human hepatocytes (FIG. 12C). In FIG. 12C, the bars indicate, from left to right for each tissue, vector genomes per allele in primary human hepatocytes transduced with the indicated vectors at multiplicities of infection (MOI) of 1.5e5, 3e5, and 6e5.

[0039] FIGS. 13A-13E are graphs showing the transduction of indicated vectors in heart, muscle, and liver cells. Transduction efficiency was measured as a function of vector genomes quantified in heart cells (FIG. 13A), gastrocnemius cells (FIG. 13B), and liver cells (FIG. 13C).

[0040] FIG. 13D and FIG. 13E are graphs showing the ratio of transduction efficiency of the indicated vectors of heart cells or gastrocnemius cells, respectively, to the transduction efficiency of the indicated vectors of liver cells.

[0041] FIGS. 14A and 14B are graphs showing the ability of AAVHSC16 to transduce various tissues in mice intravenously administered AAVHSC16 vector at the indicated doses. FIG. 14A shows the transduction efficiency as a ratio between the level of transduction of various tissues as indicated, to the level of transduction of liver tissue. Ratios were calculated by dividing the average vgs/allele detected in a specific tissue of 4-5 mice by the average vgs/allele detected in the liver of the same mice. In FIG. 14A, the dots indicate, from left to right for each dose, the ratios between the level of transduction of the heart, lung, brain, kidney, spleen, and trigeminal ganglion, to the level of transduction of liver tissue. FIG. 14B shows the transduction efficiency of AAVHSC16 in the heart and liver of 4-5 mice, presented as the average transcripts per vg per cell of each mouse per group. In FIG. 14B, for each dose, the left and right dots indicate the transduction efficiency of the heart and liver, respectively.

[0042] FIGS. 15A and 15B are graphs showing the level of I2S transcripts detected in the heart and liver, respectively, of mice intravenously administered a rAAV comprising a transgene encoding IDS packaged in AAVHSC16. Bars indicate the average transcripts per ng of RNA of 4-5 mice.

[0043] FIGS. 16A and 16B are graphs showing the ability of AAVHSC16 to express protein in the liver and secrete protein into the circulation of mice intravenously administered a rAAV comprising a transgene encoding IDS packaged in AAVHSC16, at the indicated doses. FIG. 16A shows the level of I2S activity in the liver as fold over wild-type levels, determined by dividing the I2S activity detected in the liver of mice administered the AAVHSC16 vector by the average I2S activity detected in the liver of control mice (administered formulation buffer control). FIG. 16B shows the level of I2S activity in the serum as fold over wild-type levels, determined by dividing the I2S activity detected in the serum of mice administered the AAVHSC16 vector by the average I2S activity detected in the serum of control mice. 4-5 mice were used in each condition.

### DETAILED DESCRIPTION

[0044] Provided herein are recombinant adeno-associated virus (AAV) capsid proteins, compositions (e.g., rAAV) comprising the capsid proteins, nucleic acids encoding the capsid proteins, and methods of making and using the capsid proteins. The recombinant AAV capsid proteins provided herein are engineered to comprise non-wild type amino acids at positions corresponding to amino acid positions 346, 501, 505, and/or 706 of SEQ ID NO: 14. Also provided are recombinant AAV capsid proteins wherein the amino acid in the capsid protein corresponding to amino acid position 346 of SEQ ID NO: 14 is alanine; the amino acid in the capsid protein corresponding to amino acid position 501 of SEQ ID NO: 14 is isoleucine; the amino acid in the capsid protein corresponding to amino acid position 505 of SEQ ID NO: 14 is arginine; and/or the amino acid in the capsid protein corresponding to amino acid position 706 of SEQ ID NO: 14 is cysteine, and wherein the capsid protein does not comprise the amino acid sequence of amino acids 203-736 of SEQ ID NOs: 11-15. These recombinant AAV capsid proteins demonstrate reduced transduction of liver cells compared to the parental AAV capsid proteins. These recombinant AAV capsid proteins also result in increased expression of payload in transduced cells. As shown in FIG. 1, the amino acids at positions 346, 501, 505, and 706 of AAV capsid proteins of various serotypes are well conserved.

### I. DEFINITIONS

[0045] As used herein, the term “AAV” is a standard abbreviation for adeno-associated virus.

[0046] As used herein, the term “recombinant adeno-associated virus” or “rAAV” refers to an AAV comprising a genome lacking functional rep and cap genes.

[0047] As used herein, the term “cap gene” refers to a nucleic acid sequence that encodes a capsid protein. For AAV, the capsid protein may be VP1, VP2, or VP3. VP1, VP2, and/or VP3 capsid proteins assemble into a capsid that surrounds the rAAV genome.

[0048] As used herein, the term “rep gene” refers to the nucleic acid sequences that encode the non-structural proteins (e.g., rep78, rep68, rep52, and rep40) required for the replication and production of an AAV.

[0049] As used herein, the term “rAAV genome” refers to a nucleic acid molecule (e.g., DNA and/or RNA) comprising the genome sequence of an rAAV. The skilled artisan will appreciate that where an rAAV genome comprises a transgene (e.g., a polypeptide encoding a therapeutic protein operably linked to a transcriptional regulatory element (i.e., payload)), the rAAV genome can be in the sense or antisense orientation relative to the direction of transcription of the transgene.

[0050] As used herein, an “isolated polynucleotide” refers to a polynucleotide that has been separated from one or more nucleic acid molecules present in the natural source of the polynucleotide.

[0051] As used herein, the term “editing genome” refers to an rAAV genome, comprising an editing element for editing a target locus, flanked by (i) a 5′ homology arm sequence 5′ of the editing element having homology to a first genomic region 5′ to the target locus; and (ii) a 3′ homology arm nucleotide 3′ of the editing element having homology to a second genomic region 3′ to the target locus. An editing genome is capable of integrating an editing element via homologous recombination into a target locus (e.g., a human target locus) to edit that locus (e.g., to correct a genetic defect in a gene). The skilled artisan will appreciate that the portion of an editing genome comprising a 5′ homology arm, editing element, a 3′ homology arm can be in the sense or antisense orientation relative to the target locus.

[0052] As used herein, the term “editing element” refers to the portion of an editing genome that when integrated by homologous recombination at a target locus modifies the target locus. An editing element can mediate insertion, deletion, or substitution of one or more nucleotides at the target locus.

[0053] As used herein, the term “target locus” refers to a region of a chromosome or an internucleotide bond (e.g., a region or an internucleotide bond of a human gene) that is modified by an editing element.

[0054] As used herein, the term “homology arm” refers to a portion of an editing genome positioned 5′ or 3′ of an editing element that is substantially identical (e.g., 100% identical) to a portion of the genome sequence flanking a target locus. In certain embodiments, the target locus is in a human gene, and the homology arm comprises a sequence substantially identical to the genome sequence flanking the target locus in the human gene. In certain embodiments, the target locus in an intergenic region of a genome (e.g., human genome).

[0055] As used herein, the “percentage identity” between two nucleotide sequences or between two amino acid sequences is calculated by multiplying the number of matches between the pair of aligned sequences by 100, and dividing by the length of the aligned region, including internal gaps. Identity scoring only counts perfect matches, and does not consider the degree of similarity of amino acids to one another. Note that only internal gaps are included in the length, not gaps at the sequence ends.

[0056] As used herein, a “vector” refers to a nucleic acid molecule that is a vehicle for introducing a nucleic acid molecule (e.g., a polynucleotide disclosed herein) into a cell.

[0057] As used herein, an “expression vector” refers to a vector comprising transcriptional regulatory elements operably linked to a gene of interest (e.g., a polynucleotide disclosed herein) that facilitate the expression of the gene of interest in a cell and/or a cell free expression system.

[0058] As used herein, the term “transgene” refers to a non-AAV nucleic acid sequence that encodes a polypeptide (e.g., an antibody or scFv) or non-coding RNA (e.g., a miRNA, shRNA, siRNA, antisense RNA, gRNA, antagomir, miRNA sponge, RNA aptazyme, or RNA aptamer).

[0059] As used herein, the term “transcriptional regulatory element” or “TRE” refers to a cis-acting nucleotide sequence, for example, a DNA sequence, that regulates (e.g., controls, increases, or reduces) transcription of an operably linked nucleotide sequence by an RNA polymerase to form an RNA molecule. A TRE may comprise one or more promoter elements and/or enhancer elements. A skilled artisan would appreciate that the promoter and enhancer elements in a gene may be close in location, and the term “promoter” may refer to a sequence comprising a promoter element and an enhancer element. Thus, the term “promoter” does not exclude an enhancer element in the sequence. The promoter and enhancer elements do not need to be derived from the same gene or species, and the sequence of each promoter or enhancer element may be either identical or substantially identical to the corresponding endogenous sequence in the genome.

[0060] As used herein, the term “operably linked” is used to describe the connection between a TRE and a polynucleotide sequence (e.g., a transgene disclosed herein) to be transcribed. Typically, gene expression is placed under the control of a TRE comprising one or more promoter and/or enhancer elements. The transgene is “operably linked” to the TRE if the transcription of the transgene is controlled or influenced by the TRE. The promoter and enhancer elements of the TRE may be in any orientation and/or distance from the transgene, as long as the desired transcriptional activity is obtained. In an embodiment, the TRE is upstream from the transgene.

[0061] As used herein, the term “effective amount” in the context of the administration of an AAV to a subject refers to the amount of the AAV that achieves a desired prophylactic or therapeutic effect.

### II. AAV CAPSID PROTEINS

[0062] In one aspect, the instant disclosure provides a recombinant adeno-associated virus (AAV) capsid protein, wherein the amino acid in the capsid protein corresponding to amino acid positions 346, 501, 505, 705, and/or 706 of SEQ ID NO: 14 is not the wild type amino acid (i.e., not the amino acid that occurs in nature). In certain embodiments, the instant disclosure provides a recombinant AAV capsid protein, wherein the amino acid in the capsid protein corresponding to amino acid position 346 of SEQ ID NO: 14 is not the wild type amino acid. In certain embodiments, the instant disclosure provides a recombinant AAV capsid protein, wherein the amino acid in the capsid protein corresponding to amino acid position 501 of SEQ ID NO: 14 is not the wild type amino acid. In certain embodiments, the instant disclosure provides a recombinant AAV capsid protein, wherein the amino acid in the capsid protein corresponding to amino acid position 505 of SEQ ID NO: 14 is not the wild type amino acid. In certain embodiments, the instant disclosure provides a recombinant AAV capsid protein, wherein the amino acid in the capsid protein corresponding to amino acid position 705 of SEQ ID NO: 14 is not the wild type amino acid. In certain embodiments, the instant disclosure provides a recombinant AAV capsid protein, wherein the amino acid in the capsid protein corresponding to amino acid position 706 of SEQ ID NO: 14 is not the wild type amino acid.

[0063] In certain embodiments, the instant disclosure provides a recombinant AAV capsid protein, wherein the amino acid in the capsid protein corresponding to amino acid positions 346 and 501 of SEQ ID NO: 14 is not the wild type amino acid. In certain embodiments, the instant disclosure provides a recombinant AAV capsid protein, wherein the amino acid in the capsid protein corresponding to amino acid positions 346 and 505 of SEQ ID NO: 14 is not the wild type amino acid. In certain embodiments, the instant disclosure provides a recombinant AAV capsid protein, wherein the amino acid in the capsid protein corresponding to amino acid positions 346 and 705 of SEQ ID NO: 14 is not the wild type amino acid. In certain embodiments, the instant disclosure provides a recombinant AAV capsid protein, wherein the amino acid in the capsid protein corresponding to amino acid positions 346 and 706 of SEQ ID NO: 14 is not the wild type amino acid. In certain embodiments, the instant disclosure provides a recombinant AAV capsid protein, wherein the amino acid in the capsid protein corresponding to amino acid positions 501 and 505 of SEQ ID NO: 14 is not the wild type amino acid. In certain embodiments, the instant disclosure provides a recombinant AAV capsid protein, wherein the amino acid in the capsid protein corresponding to amino acid positions 501 and 705 of SEQ ID NO: 14 is not the wild type amino acid. In certain embodiments, the instant disclosure provides a recombinant AAV capsid protein, wherein the amino acid in the capsid protein corresponding to amino acid positions 501 and 706 of SEQ ID NO: 14 is not the wild type amino acid. In certain embodiments, the instant disclosure provides a recombinant AAV capsid protein, wherein the amino acid in the capsid protein corresponding to amino acid positions 505 and 705 of SEQ ID NO: 14 is not the wild type amino acid. In certain embodiments, the instant disclosure provides a recombinant AAV capsid protein, wherein the amino acid in the capsid protein corresponding to amino acid positions 505 and 706 of SEQ ID NO: 14 is not the wild type amino acid. In certain embodiments, the instant disclosure provides a recombinant AAV capsid protein, wherein the amino acid in the capsid protein corresponding to amino acid positions 705 and 706 of SEQ ID NO: 14 is not the wild type amino acid.

[0064] In certain embodiments, the instant disclosure provides a recombinant AAV capsid protein, wherein the amino acid in the capsid protein corresponding to amino acid positions 346, 501, and 505 of SEQ ID NO: 14 is not the wild type amino acid. In certain embodiments, the instant disclosure provides a recombinant AAV capsid protein, wherein the amino acid in the capsid protein corresponding to amino acid positions 346, 501, and 705 of SEQ ID NO: 14 is not the wild type amino acid. In certain embodiments, the instant disclosure provides a recombinant AAV capsid protein, wherein the amino acid in the capsid protein corresponding to amino acid positions 346, 501, and 706 of SEQ ID NO: 14 is not the wild type amino acid. In certain embodiments, the instant disclosure provides a recombinant AAV capsid protein, wherein the amino acid in the capsid protein corresponding to amino acid positions 346, 505, and 705 of SEQ ID NO: 14 is not the wild type amino acid. In certain embodiments, the instant disclosure provides a recombinant AAV capsid protein, wherein the amino acid in the capsid protein corresponding to amino acid positions 346, 505, and 706 of SEQ ID NO: 14 is not the wild type amino acid. In certain embodiments, the instant disclosure provides a recombinant AAV capsid protein, wherein the amino acid in the capsid protein corresponding to amino acid positions 346, 705, and 706 of SEQ ID NO: 14 is not the wild type amino acid. In certain embodiments, the instant disclosure provides a recombinant AAV capsid protein, wherein the amino acid in the capsid protein corresponding to amino acid positions 501, 505, and 705 of SEQ ID NO: 14 is not the wild type amino acid. In certain embodiments, the instant disclosure provides a recombinant AAV capsid protein, wherein the amino acid in the capsid protein corresponding to amino acid positions 501, 505, and 706 of SEQ ID NO: 14 is not the wild type amino acid. In certain embodiments, the instant disclosure provides a recombinant AAV capsid protein, wherein the amino acid in the capsid protein corresponding to amino acid positions 501, 705, and 706 of SEQ ID NO: 14 is not the wild type amino acid. In certain embodiments, the instant disclosure provides a recombinant AAV capsid protein, wherein the amino acid in the capsid protein corresponding to amino acid positions 505, 705, and 706 of SEQ ID NO: 14 is not the wild type amino acid.

[0065] In certain embodiments, the instant disclosure provides a recombinant AAV capsid protein, wherein the amino acid in the capsid protein corresponding to amino acid positions 346, 501, 505, and 705 of SEQ ID NO: 14 is not the wild type amino acid. In certain embodiments, the instant disclosure provides a recombinant AAV capsid protein, wherein the amino acid in the capsid protein corresponding to amino acid positions 346, 501, 505, and 706 of SEQ ID NO: 14 is not the wild type amino acid. In certain embodiments, the instant disclosure provides a recombinant AAV capsid protein, wherein the amino acid in the capsid protein corresponding to amino acid positions 346, 501, 705, and 706 of SEQ ID NO: 14 is not the wild type amino acid. In certain embodiments, the instant disclosure provides a recombinant AAV capsid protein, wherein the amino acid in the capsid protein corresponding to amino acid positions 346, 505, 705, and 706 of SEQ ID NO: 14 is not the wild type amino acid.

[0066] In certain embodiments, the instant disclosure provides a recombinant AAV capsid protein, wherein the amino acid in the capsid protein corresponding to amino acid positions 346, 501, 505, 705, and 706 of SEQ ID NO: 14 is not the wild type amino acid.

[0067] In another aspect, the instant disclosure provides a recombinant adeno-associated virus (AAV) capsid protein, wherein: the amino acid in the capsid protein corresponding to amino acid position 346 of SEQ ID NO: 14 is alanine or glycine; the amino acid in the capsid protein corresponding to amino acid position 501 of SEQ ID NO: 14 is isoleucine; the amino acid in the capsid protein corresponding to amino acid position 505 of SEQ ID NO: 14 is arginine; the amino acid in the capsid protein corresponding to amino acid position 705 of SEQ ID NO: 14 is leucine; and/or the amino acid in the capsid protein corresponding to amino acid position 706 of SEQ ID NO: 14 is cysteine, and wherein the capsid protein does not comprise the amino acid sequence of amino acids 203-736 of SEQ ID NOs: 11-15. In certain embodiments, the instant disclosure provides a recombinant adeno-associated virus (AAV) capsid protein, wherein: the amino acid in the capsid protein corresponding to amino acid position 346 of SEQ ID NO: 14 is alanine; the amino acid in the capsid protein corresponding to amino acid position 501 of SEQ ID NO: 14 is isoleucine; the amino acid in the capsid protein corresponding to amino acid position 505 of SEQ ID NO: 14 is arginine; and/or the amino acid in the capsid protein corresponding to amino acid position 706 of SEQ ID NO: 14 is cysteine, and wherein the capsid protein does not comprise the amino acid sequence of amino acids 203-736 of SEQ ID NOs: 11-15.

[0068] In certain embodiments, the amino acid in the capsid protein corresponding to amino acid position 501 of SEQ ID NO: 14 is leucine, threonine, tyrosine, or tryptophan.

[0069] In certain embodiments, the instant disclosure provides a recombinant adeno-associated virus (AAV) capsid protein, wherein: the amino acid in the capsid protein corresponding to amino acid position 346 of SEQ ID NO: 14 is alanine, and wherein the capsid protein does not comprise the amino acid sequence of amino acids 203-736 of SEQ ID NOs: 11-15. In certain embodiments, the instant disclosure provides a recombinant adeno-associated virus (AAV) capsid protein, wherein: the amino acid in the capsid protein corresponding to amino acid position 346 of SEQ ID NO: 14 is glycine, and wherein the capsid protein does not comprise the amino acid sequence of amino acids 203-736 of SEQ ID NOs: 11-15. In certain embodiments, the instant disclosure provides a recombinant adeno-associated virus (AAV) capsid protein, wherein: the amino acid in the capsid protein corresponding to amino acid position 501 of SEQ ID NO: 14 is isoleucine, and wherein the capsid protein does not comprise the amino acid sequence of amino acids 203-736 of SEQ ID NOs: 11-15. In certain embodiments, the instant disclosure provides a recombinant adeno-associated virus (AAV) capsid protein, wherein: the amino acid in the capsid protein corresponding to amino acid position 501 of SEQ ID NO: 14 is leucine, and wherein the capsid protein does not comprise the amino acid sequence of amino acids 203-736 of SEQ ID NOs: 11-15. In certain embodiments, the instant disclosure provides a recombinant adeno-associated virus (AAV) capsid protein, wherein: the amino acid in the capsid protein corresponding to amino acid position 501 of SEQ ID NO: 14 is threonine, and wherein the capsid protein does not comprise the amino acid sequence of amino acids 203-736 of SEQ ID NOs: 11-15. In certain embodiments, the instant disclosure provides a recombinant adeno-associated virus (AAV) capsid protein, wherein: the amino acid in the capsid protein corresponding to amino acid position 501 of SEQ ID NO: 14 is tryptophan, and wherein the capsid protein does not comprise the amino acid sequence of amino acids 203-736 of SEQ ID NOs: 11-15. In certain embodiments, the instant disclosure provides a recombinant adeno-associated virus (AAV) capsid protein, wherein: the amino acid in the capsid protein corresponding to amino acid position 501 of SEQ ID NO: 14 is tyrosine, and wherein the capsid protein does not comprise the amino acid sequence of amino acids 203-736 of SEQ ID NOs: 11-15. In certain embodiments, the instant disclosure provides a recombinant adeno-associated virus (AAV) capsid protein, wherein: the amino acid in the capsid protein corresponding to amino acid position 505 of SEQ ID NO: 14 is arginine, and wherein the capsid protein does not comprise the amino acid sequence of amino acids 203-736 of SEQ ID NOs: 11-15. In certain embodiments, the instant disclosure provides a recombinant adeno-associated virus (AAV) capsid protein, wherein: the amino acid in the capsid protein corresponding to amino acid position 705 of SEQ ID NO: 14 is leucine, and wherein the capsid protein does not comprise the amino acid sequence of amino acids 203-736 of SEQ ID NOs: 11-15. In certain embodiments, the instant disclosure provides a recombinant adeno-associated virus (AAV) capsid protein, wherein: the amino acid in the capsid protein corresponding to amino acid position 706 of SEQ ID NO: 14 is cysteine, and wherein the capsid protein does not comprise the amino acid sequence of amino acids 203-736 of SEQ ID NOs: 11-15.

[0070] In certain embodiments, the instant disclosure provides a recombinant adeno-associated virus (AAV) capsid protein, wherein: the amino acid in the capsid protein corresponding to amino acid position 346 of SEQ ID NO: 14 is alanine or glycine; and the amino acid in the capsid protein corresponding to amino acid position 501 of SEQ ID NO: 14 is isoleucine, and wherein the capsid protein does not comprise the amino acid sequence of amino acids 203-736 of SEQ ID NOs: 11-15. In certain embodiments, the instant disclosure provides a recombinant adeno-associated virus (AAV) capsid protein, wherein: the amino acid in the capsid protein corresponding to amino acid position 346 of SEQ ID NO: 14 is alanine or glycine; and the amino acid in the capsid protein corresponding to amino acid position 505 of SEQ ID NO: 14 is arginine, and wherein the capsid protein does not comprise the amino acid sequence of amino acids 203-736 of SEQ ID NOs: 11-15. In certain embodiments, the instant disclosure provides a recombinant adeno-associated virus (AAV) capsid protein, wherein: the amino acid in the capsid protein corresponding to amino acid position 346 of SEQ ID NO: 14 is alanine or glycine; and the amino acid in the capsid protein corresponding to amino acid position 706 of SEQ ID NO: 14 is cysteine, and wherein the capsid protein does not comprise the amino acid sequence of amino acids 203-736 of SEQ ID NOs: 11-15. In certain embodiments, the instant disclosure provides a recombinant adeno-associated virus (AAV) capsid protein, wherein: the amino acid in the capsid protein corresponding to amino acid position 501 of SEQ ID NO: 14 is isoleucine; and the amino acid in the capsid protein corresponding to amino acid position 505 of SEQ ID NO: 14 is arginine, and wherein the capsid protein does not comprise the amino acid sequence of amino acids 203-736 of SEQ ID NOs: 11-15. In certain embodiments, the instant disclosure provides a recombinant adeno-associated virus (AAV) capsid protein, wherein: the amino acid in the capsid protein corresponding to amino acid position 501 of SEQ ID NO: 14 is isoleucine; and the amino acid in the capsid protein corresponding to amino acid position 706 of SEQ ID NO: 14 is cysteine, and wherein the capsid protein does not comprise the amino acid sequence of amino acids 203-736 of SEQ ID NOs: 11-15. In certain embodiments, the instant disclosure provides a recombinant adeno-associated virus (AAV) capsid protein, wherein: the amino acid in the capsid protein corresponding to amino acid position 505 of SEQ ID NO: 14 is arginine; and the amino acid in the capsid protein corresponding to amino acid position 706 of SEQ ID NO: 14 is cysteine, and wherein the capsid protein does not comprise the amino acid sequence of amino acids 203-736 of SEQ ID NOs: 11-15.

[0071] In certain embodiments, the instant disclosure provides a recombinant adeno-associated virus (AAV) capsid protein, wherein: the amino acid in the capsid protein corresponding to amino acid position 346 of SEQ ID NO: 14 is alanine or glycine; the amino acid in the capsid protein corresponding to amino acid position 705 of SEQ ID NO: 14 is leucine; and the amino acid in the capsid protein corresponding to amino acid position 501 of SEQ ID NO: 14 is isoleucine, and wherein the capsid protein does not comprise the amino acid sequence of amino acids 203-736 of SEQ ID NOs: 11-15. In certain embodiments, the instant disclosure provides a recombinant adeno-associated virus (AAV) capsid protein, wherein: the amino acid in the capsid protein corresponding to amino acid position 346 of SEQ ID NO: 14 is alanine or glycine; the amino acid in the capsid protein corresponding to amino acid position 705 of SEQ ID NO: 14 is leucine; and the amino acid in the capsid protein corresponding to amino acid position 505 of SEQ ID NO: 14 is arginine, and wherein the capsid protein does not comprise the amino acid sequence of amino acids 203-736 of SEQ ID NOs: 11-15. In certain embodiments, the instant disclosure provides a recombinant adeno-associated virus (AAV) capsid protein, wherein: the amino acid in the capsid protein corresponding to amino acid position 346 of SEQ ID NO: 14 is alanine or glycine; the amino acid in the capsid protein corresponding to amino acid position 705 of SEQ ID NO: 14 is leucine; and the amino acid in the capsid protein corresponding to amino acid position 706 of SEQ ID NO: 14 is cysteine, and wherein the capsid protein does not comprise the amino acid sequence of amino acids 203-736 of SEQ ID NOs: 11-15. In certain embodiments, the instant disclosure provides a recombinant adeno-associated virus (AAV) capsid protein, wherein: the amino acid in the capsid protein corresponding to amino acid position 501 of SEQ ID NO: 14 is isoleucine; the amino acid in the capsid protein corresponding to amino acid position 705 of SEQ ID NO: 14 is leucine; and the amino acid in the capsid protein corresponding to amino acid position 505 of SEQ ID NO: 14 is arginine, and wherein the capsid protein does not comprise the amino acid sequence of amino acids 203-736 of SEQ ID NOs: 11-15. In certain embodiments, the instant disclosure provides a recombinant adeno-associated virus (AAV) capsid protein, wherein: the amino acid in the capsid protein corresponding to amino acid position 501 of SEQ ID NO: 14 is isoleucine; the amino acid in the capsid protein corresponding to amino acid position 705 of SEQ ID NO: 14 is leucine; and the amino acid in the capsid protein corresponding to amino acid position 706 of SEQ ID NO: 14 is cysteine, and wherein the capsid protein does not comprise the amino acid sequence of amino acids 203-736 of SEQ ID NOs: 11-15. In certain embodiments, the instant disclosure provides a recombinant adeno-associated virus (AAV) capsid protein, wherein: the amino acid in the capsid protein corresponding to amino acid position 505 of SEQ ID NO: 14 is arginine; the amino acid in the capsid protein corresponding to amino acid position 705 of SEQ ID NO: 14 is leucine; and the amino acid in the capsid protein corresponding to amino acid position 706 of SEQ ID NO: 14 is cysteine, and wherein the capsid protein does not comprise the amino acid sequence of amino acids 203-736 of SEQ ID NOs: 11-15.

[0072] In certain embodiments, the instant disclosure provides a recombinant adeno-associated virus (AAV) capsid protein, wherein: the amino acid in the capsid protein corresponding to amino acid position 346 of SEQ ID NO: 14 is alanine or glycine; the amino acid in the capsid protein corresponding to amino acid position 501 of SEQ ID NO: 14 is isoleucine; and the amino acid in the capsid protein corresponding to amino acid position 505 of SEQ ID NO: 14 is arginine, and wherein the capsid protein does not comprise the amino acid sequence of amino acids 203-736 of SEQ ID NOs: 11-15. In certain embodiments, the instant disclosure provides a recombinant adeno-associated virus (AAV) capsid protein, wherein: the amino acid in the capsid protein corresponding to amino acid position 346 of SEQ ID NO: 14 is alanine or glycine; the amino acid in the capsid protein corresponding to amino acid position 501 of SEQ ID NO: 14 is isoleucine; and the amino acid in the capsid protein corresponding to amino acid position 706 of SEQ ID NO: 14 is cysteine, and wherein the capsid protein does not comprise the amino acid sequence of amino acids 203-736 of SEQ ID NOs: 11-15. In certain embodiments, the instant disclosure provides a recombinant adeno-associated virus (AAV) capsid protein, wherein: the amino acid in the capsid protein corresponding to amino acid position 501 of SEQ ID NO: 14 is isoleucine; the amino acid in the capsid protein corresponding to amino acid position 505 of SEQ ID NO: 14 is arginine; and the amino acid in the capsid protein corresponding to amino acid position 706 of SEQ ID NO: 14 is cysteine, and wherein the capsid protein does not comprise the amino acid sequence of amino acids 203-736 of SEQ ID NOs: 11-15. In certain embodiments, the instant disclosure provides a recombinant adeno-associated virus (AAV) capsid protein, wherein: the amino acid in the capsid protein corresponding to amino acid position 346 of SEQ ID NO: 14 is alanine or glycine; the amino acid in the capsid protein corresponding to amino acid position 505 of SEQ ID NO: 14 is arginine; and the amino acid in the capsid protein corresponding to amino acid position 706 of SEQ ID NO: 14 is cysteine, and wherein the capsid protein does not comprise the amino acid sequence of amino acids 203-736 of SEQ ID NOs: 11-15.

[0073] In certain embodiments, the instant disclosure provides a recombinant adeno-associated virus (AAV) capsid protein, wherein: the amino acid in the capsid protein corresponding to amino acid position 346 of SEQ ID NO: 14 is alanine or glycine; the amino acid in the capsid protein corresponding to amino acid position 501 of SEQ ID NO: 14 is isoleucine; the amino acid in the capsid protein corresponding to amino acid position 705 of SEQ ID NO: 14 is leucine; and the amino acid in the capsid protein corresponding to amino acid position 505 of SEQ ID NO: 14 is arginine, and wherein the capsid protein does not comprise the amino acid sequence of amino acids 203-736 of SEQ ID NOs: 11-15. In certain embodiments, the instant disclosure provides a recombinant adeno-associated virus (AAV) capsid protein, wherein: the amino acid in the capsid protein corresponding to amino acid position 346 of SEQ ID NO: 14 is alanine or glycine; the amino acid in the capsid protein corresponding to amino acid position 501 of SEQ ID NO: 14 is isoleucine; the amino acid in the capsid protein corresponding to amino acid position 705 of SEQ ID NO: 14 is leucine; and the amino acid in the capsid protein corresponding to amino acid position 706 of SEQ ID NO: 14 is cysteine, and wherein the capsid protein does not comprise the amino acid sequence of amino acids 203-736 of SEQ ID NOs: 11-15. In certain embodiments, the instant disclosure provides a recombinant adeno-associated virus (AAV) capsid protein, wherein: the amino acid in the capsid protein corresponding to amino acid position 501 of SEQ ID NO: 14 is isoleucine; the amino acid in the capsid protein corresponding to amino acid position 505 of SEQ ID NO: 14 is arginine; the amino acid in the capsid protein corresponding to amino acid position 705 of SEQ ID NO: 14 is leucine; and the amino acid in the capsid protein corresponding to amino acid position 706 of SEQ ID NO: 14 is cysteine, and wherein the capsid protein does not comprise the amino acid sequence of amino acids 203-736 of SEQ ID NOs: 11-15. In certain embodiments, the instant disclosure provides a recombinant adeno-associated virus (AAV) capsid protein, wherein: the amino acid in the capsid protein corresponding to amino acid position 346 of SEQ ID NO: 14 is alanine or glycine; the amino acid in the capsid protein corresponding to amino acid position 505 of SEQ ID NO: 14 is arginine; the amino acid in the capsid protein corresponding to amino acid position 705 of SEQ ID NO: 14 is leucine; and the amino acid in the capsid protein corresponding to amino acid position 706 of SEQ ID NO: 14 is cysteine, and wherein the capsid protein does not comprise the amino acid sequence of amino acids 203-736 of SEQ ID NOs: 11-15.

[0074] In certain embodiments, the instant disclosure provides a recombinant adeno-associated virus (AAV) capsid protein, wherein: the amino acid in the capsid protein corresponding to amino acid position 346 of SEQ ID NO: 14 is alanine or glycine; the amino acid in the capsid protein corresponding to amino acid position 501 of SEQ ID NO: 14 is isoleucine; the amino acid in the capsid protein corresponding to amino acid position 505 of SEQ ID NO: 14 is arginine; and the amino acid in the capsid protein corresponding to amino acid position 706 of SEQ ID NO: 14 is cysteine, and wherein the capsid protein does not comprise the amino acid sequence of amino acids 203-736 of SEQ ID NOs: 11-15.

[0075] In certain embodiments, the instant disclosure provides a recombinant adeno-associated virus (AAV) capsid protein, wherein: the amino acid in the capsid protein corresponding to amino acid position 346 of SEQ ID NO: 14 is alanine or glycine; the amino acid in the capsid protein corresponding to amino acid position 501 of SEQ ID NO: 14 is isoleucine; the amino acid in the capsid protein corresponding to amino acid position 505 of SEQ ID NO: 14 is arginine; the amino acid in the capsid protein corresponding to amino acid position 705 of SEQ ID NO: 14 is leucine; and the amino acid in the capsid protein corresponding to amino acid position 706 of SEQ ID NO: 14 is cysteine, and wherein the capsid protein does not comprise the amino acid sequence of amino acids 203-736 of SEQ ID NOs: 11-15.

[0076] In certain embodiments, the recombinant AAV capsid protein is a variant of a clade A, clade B, clade C, clade D, clade E, clade F, clade G, clade H, clade I, AAVgo.1, AAV3, AAV4, AAV10, AAV11, AAV12, rh.32, rh32.33, rh.33, rh.34, BAAV, or AAV5 capsid protein.

[0077] In certain embodiments, the instant disclosure provides a recombinant adeno-associated virus (AAV) capsid protein, wherein the amino acid in the capsid protein corresponding to amino acid positions 346, 501, 505, 705, and/or 706 of SEQ ID NO: 14 is not the wild type amino acid (i.e., not the amino acid that occurs in nature), and wherein the recombinant AAV capsid protein comprises an amino acid sequence that is at least 70%, at least 75%, at least 80%, at least 85%, at least 86%, at least 87%, at least 88%, at least 89%, at least 90%, at least 91%, at least 92%, at least 93%, at least 94%, at least 95%, at least 96%, at least 97%, at least 98%, or at least 99% identical to any one of the amino acid sequences of SEQ ID NOs: 1-30. In certain embodiments, the instant disclosure provides a recombinant adeno-associated virus (AAV) capsid protein, wherein the amino acid in the capsid protein corresponding to amino acid positions 346, 501, 505, 705, and/or 706 of SEQ ID NO: 14 is not the wild type amino acid (i.e., not the amino acid that occurs in nature), and wherein the recombinant AAV capsid protein comprises an amino acid sequence that is at least 70%, at least 75%, at least 80%, at least 85%, at least 86%, at least 87%, at least 88%, at least 89%, at least 90%, at least 91%, at least 92%, at least 93%, at least 94%, at least 95%, at least 96%, at least 97%, at least 98%, or at least 99% identical to any one of the amino acid sequences of SEQ ID NOs: 31-411 and 453-1304.

[0078] In certain embodiments, the instant disclosure provides a recombinant AAV capsid protein, wherein the amino acid in the capsid protein corresponding to amino acid position 346 of SEQ ID NO: 14 is not the wild type amino acid, and wherein the recombinant AAV capsid protein comprises an amino acid sequence that is at least 70%, at least 75%, at least 80%, at least 85%, at least 86%, at least 87%, at least 88%, at least 89%, at least 90%, at least 91%, at least 92%, at least 93%, at least 94%, at least 95%, at least 96%, at least 97%, at least 98%, or at least 99% identical to the amino acid sequence of SEQ ID NOs: 1-30. In certain embodiments, the instant disclosure provides a recombinant AAV capsid protein, wherein the amino acid in the capsid protein corresponding to amino acid position 346 of SEQ ID NO: 14 is not the wild type amino acid, and wherein the recombinant AAV capsid protein comprises an amino acid sequence that is at least 70%, at least 75%, at least 80%, at least 85%, at least 86%, at least 87%, at least 88%, at least 89%, at least 90%, at least 91%, at least 92%, at least 93%, at least 94%, at least 95%, at least 96%, at least 97%, at least 98%, or at least 99% identical to any one of the amino acid sequences of SEQ ID NOs: 31-411 and 453-1304.

[0079] In certain embodiments, the instant disclosure provides a recombinant AAV capsid protein, wherein the amino acid in the capsid protein corresponding to amino acid position 501 of SEQ ID NO: 14 is not the wild type amino acid, and wherein the recombinant AAV capsid protein comprises an amino acid sequence that is at least 70%, at least 75%, at least 80%, at least 85%, at least 86%, at least 87%, at least 88%, at least 89%, at least 90%, at least 91%, at least 92%, at least 93%, at least 94%, at least 95%, at least 96%, at least 97%, at least 98%, or at least 99% identical to the amino acid sequence of SEQ ID NOs: 1-30. In certain embodiments, the instant disclosure provides a recombinant AAV capsid protein, wherein the amino acid in the capsid protein corresponding to amino acid position 501 of SEQ ID NO: 14 is not the wild type amino acid, and wherein the recombinant AAV capsid protein comprises an amino acid sequence that is at least 70%, at least 75%, at least 80%, at least 85%, at least 86%, at least 87%, at least 88%, at least 89%, at least 90%, at least 91%, at least 92%, at least 93%, at least 94%, at least 95%, at least 96%, at least 97%, at least 98%, or at least 99% identical to any one of the amino acid sequences of SEQ ID NOs: 31-411 and 453-1304.

[0080] In certain embodiments, the instant disclosure provides a recombinant AAV capsid protein, wherein the amino acid in the capsid protein corresponding to amino acid position 505 of SEQ ID NO: 14 is not the wild type amino acid, and wherein the recombinant AAV capsid protein comprises an amino acid sequence that is at least 70%, at least 75%, at least 80%, at least 85%, at least 86%, at least 87%, at least 88%, at least 89%, at least 90%, at least 91%, at least 92%, at least 93%, at least 94%, at least 95%, at least 96%, at least 97%, at least 98%, or at least 99% identical to the amino acid sequence of SEQ ID NOs: 1-30. In certain embodiments, the instant disclosure provides a recombinant AAV capsid protein, wherein the amino acid in the capsid protein corresponding to amino acid position 505 of SEQ ID NO: 14 is not the wild type amino acid, and wherein the recombinant AAV capsid protein comprises an amino acid sequence that is at least 70%, at least 75%, at least 80%, at least 85%, at least 86%, at least 87%, at least 88%, at least 89%, at least 90%, at least 91%, at least 92%, at least 93%, at least 94%, at least 95%, at least 96%, at least 97%, at least 98%, or at least 99% identical to any one of the amino acid sequences of SEQ ID NOs: 31-411 and 453-1304.

[0081] In certain embodiments, the instant disclosure provides a recombinant AAV capsid protein, wherein the amino acid in the capsid protein corresponding to amino acid position 705 of SEQ ID NO: 14 is not the wild type amino acid, and wherein the recombinant AAV capsid protein comprises an amino acid sequence that is at least 70%, at least 75%, at least 80%, at least 85%, at least 86%, at least 87%, at least 88%, at least 89%, at least 90%, at least 91%, at least 92%, at least 93%, at least 94%, at least 95%, at least 96%, at least 97%, at least 98%, or at least 99% identical to the amino acid sequence of SEQ ID NOs: 1-30. In certain embodiments, the instant disclosure provides a recombinant AAV capsid protein, wherein the amino acid in the capsid protein corresponding to amino acid position 705 of SEQ ID NO: 14 is not the wild type amino acid, and wherein the recombinant AAV capsid protein comprises an amino acid sequence that is at least 70%, at least 75%, at least 80%, at least 85%, at least 86%, at least 87%, at least 88%, at least 89%, at least 90%, at least 91%, at least 92%, at least 93%, at least 94%, at least 95%, at least 96%, at least 97%, at least 98%, or at least 99% identical to any one of the amino acid sequences of SEQ ID NOs: 31-411 and 453-1304.

[0082] In certain embodiments, the instant disclosure provides a recombinant AAV capsid protein, wherein the amino acid in the capsid protein corresponding to amino acid position 706 of SEQ ID NO: 14 is not the wild type amino acid, and wherein the recombinant AAV capsid protein comprises an amino acid sequence that is at least 70%, at least 75%, at least 80%, at least 85%, at least 86%, at least 87%, at least 88%, at least 89%, at least 90%, at least 91%, at least 92%, at least 93%, at least 94%, at least 95%, at least 96%, at least 97%, at least 98%, or at least 99% identical to the amino acid sequence of SEQ ID NOs: 1-30. In certain embodiments, the instant disclosure provides a recombinant AAV capsid protein, wherein the amino acid in the capsid protein corresponding to amino acid position 706 of SEQ ID NO: 14 is not the wild type amino acid, and wherein the recombinant AAV capsid protein comprises an amino acid sequence that is at least 70%, at least 75%, at least 80%, at least 85%, at least 86%, at least 87%, at least 88%, at least 89%, at least 90%, at least 91%, at least 92%, at least 93%, at least 94%, at least 95%, at least 96%, at least 97%, at least 98%, or at least 99% identical to any one of the amino acid sequences of SEQ ID NOs: 31-411 and 453-1304.

[0083] In certain embodiments, the instant disclosure provides a recombinant AAV capsid protein, wherein the amino acid in the capsid protein corresponding to amino acid positions 346 and 501 of SEQ ID NO: 14 is not the wild type amino acid, and wherein the recombinant AAV capsid protein comprises an amino acid sequence that is at least 70%, at least 75%, at least 80%, at least 85%, at least 86%, at least 87%, at least 88%, at least 89%, at least 90%, at least 91%, at least 92%, at least 93%, at least 94%, at least 95%, at least 96%, at least 97%, at least 98%, or at least 99% identical to the amino acid sequence of SEQ ID NOs: 1-30. In certain embodiments, the instant disclosure provides a recombinant AAV capsid protein, wherein the amino acid in the capsid protein corresponding to amino acid positions 346 and 501 of SEQ ID NO: 14 is not the wild type amino acid, and wherein the recombinant AAV capsid protein comprises an amino acid sequence that is at least 70%, at least 75%, at least 80%, at least 85%, at least 86%, at least 87%, at least 88%, at least 89%, at least 90%, at least 91%, at least 92%, at least 93%, at least 94%, at least 95%, at least 96%, at least 97%, at least 98%, or at least 99% identical to any one of the amino acid sequences of SEQ ID NOs: 31-411 and 453-1304.

[0084] In certain embodiments, the instant disclosure provides a recombinant AAV capsid protein, wherein the amino acid in the capsid protein corresponding to amino acid positions 346 and 505 of SEQ ID NO: 14 is not the wild type amino acid, and wherein the recombinant AAV capsid protein comprises an amino acid sequence that is at least 70%, at least 75%, at least 80%, at least 85%, at least 86%, at least 87%, at least 88%, at least 89%, at least 90%, at least 91%, at least 92%, at least 93%, at least 94%, at least 95%, at least 96%, at least 97%, at least 98%, or at least 99% identical to the amino acid sequence of SEQ ID NOs: 1-30. In certain embodiments, the instant disclosure provides a recombinant AAV capsid protein, wherein the amino acid in the capsid protein corresponding to amino acid positions 346 and 505 of SEQ ID NO: 14 is not the wild type amino acid, and wherein the recombinant AAV capsid protein comprises an amino acid sequence that is at least 70%, at least 75%, at least 80%, at least 85%, at least 86%, at least 87%, at least 88%, at least 89%, at least 90%, at least 91%, at least 92%, at least 93%, at least 94%, at least 95%, at least 96%, at least 97%, at least 98%, or at least 99% identical to any one of the amino acid sequences of SEQ ID NOs: 31-411 and 453-1304.

[0085] In certain embodiments, the instant disclosure provides a recombinant AAV capsid protein, wherein the amino acid in the capsid protein corresponding to amino acid positions 346 and 705 of SEQ ID NO: 14 is not the wild type amino acid, and wherein the recombinant AAV capsid protein comprises an amino acid sequence that is at least 70%, at least 75%, at least 80%, at least 85%, at least 86%, at least 87%, at least 88%, at least 89%, at least 90%, at least 91%, at least 92%, at least 93%, at least 94%, at least 95%, at least 96%, at least 97%, at least 98%, or at least 99% identical to the amino acid sequence of SEQ ID NOs: 1-30. In certain embodiments, the instant disclosure provides a recombinant AAV capsid protein, wherein the amino acid in the capsid protein corresponding to amino acid positions 346 and 705 of SEQ ID NO: 14 is not the wild type amino acid, and wherein the recombinant AAV capsid protein comprises an amino acid sequence that is at least 70%, at least 75%, at least 80%, at least 85%, at least 86%, at least 87%, at least 88%, at least 89%, at least 90%, at least 91%, at least 92%, at least 93%, at least 94%, at least 95%, at least 96%, at least 97%, at least 98%, or at least 99% identical to any one of the amino acid sequences of SEQ ID NOs: 31-411 and 453-1304.

[0086] In certain embodiments, the instant disclosure provides a recombinant AAV capsid protein, wherein the amino acid in the capsid protein corresponding to amino acid positions 346 and 706 of SEQ ID NO: 14 is not the wild type amino acid, and wherein the recombinant AAV capsid protein comprises an amino acid sequence that is at least 70%, at least 75%, at least 80%, at least 85%, at least 86%, at least 87%, at least 88%, at least 89%, at least 90%, at least 91%, at least 92%, at least 93%, at least 94%, at least 95%, at least 96%, at least 97%, at least 98%, or at least 99% identical to the amino acid sequence of SEQ ID NOs: 1-30. In certain embodiments, the instant disclosure provides a recombinant AAV capsid protein, wherein the amino acid in the capsid protein corresponding to amino acid positions 346 and 706 of SEQ ID NO: 14 is not the wild type amino acid, and wherein the recombinant AAV capsid protein comprises an amino acid sequence that is at least 70%, at least 75%, at least 80%, at least 85%, at least 86%, at least 87%, at least 88%, at least 89%, at least 90%, at least 91%, at least 92%, at least 93%, at least 94%, at least 95%, at least 96%, at least 97%, at least 98%, or at least 99% identical to any one of the amino acid sequences of SEQ ID NOs: 31-411 and 453-1304.

[0087] In certain embodiments, the instant disclosure provides a recombinant AAV capsid protein, wherein the amino acid in the capsid protein corresponding to amino acid positions 501 and 505 of SEQ ID NO: 14 is not the wild type amino acid, and wherein the recombinant AAV capsid protein comprises an amino acid sequence that is at least 70%, at least 75%, at least 80%, at least 85%, at least 86%, at least 87%, at least 88%, at least 89%, at least 90%, at least 91%, at least 92%, at least 93%, at least 94%, at least 95%, at least 96%, at least 97%, at least 98%, or at least 99% identical to the amino acid sequence of SEQ ID NOs: 1-30. In certain embodiments, the instant disclosure provides a recombinant AAV capsid protein, wherein the amino acid in the capsid protein corresponding to amino acid positions 501 and 505 of SEQ ID NO: 14 is not the wild type amino acid, and wherein the recombinant AAV capsid protein comprises an amino acid sequence that is at least 70%, at least 75%, at least 80%, at least 85%, at least 86%, at least 87%, at least 88%, at least 89%, at least 90%, at least 91%, at least 92%, at least 93%, at least 94%, at least 95%, at least 96%, at least 97%, at least 98%, or at least 99% identical to any one of the amino acid sequences of SEQ ID NOs: 31-411 and 453-1304.

[0088] In certain embodiments, the instant disclosure provides a recombinant AAV capsid protein, wherein the amino acid in the capsid protein corresponding to amino acid positions 501 and 705 of SEQ ID NO: 14 is not the wild type amino acid, and wherein the recombinant AAV capsid protein comprises an amino acid sequence that is at least 70%, at least 75%, at least 80%, at least 85%, at least 86%, at least 87%, at least 88%, at least 89%, at least 90%, at least 91%, at least 92%, at least 93%, at least 94%, at least 95%, at least 96%, at least 97%, at least 98%, or at least 99% identical to the amino acid sequence of SEQ ID NOs: 1-30. In certain embodiments, the instant disclosure provides a recombinant AAV capsid protein, wherein the amino acid in the capsid protein corresponding to amino acid positions 501 and 705 of SEQ ID NO: 14 is not the wild type amino acid, and wherein the recombinant AAV capsid protein comprises an amino acid sequence that is at least 70%, at least 75%, at least 80%, at least 85%, at least 86%, at least 87%, at least 88%, at least 89%, at least 90%, at least 91%, at least 92%, at least 93%, at least 94%, at least 95%, at least 96%, at least 97%, at least 98%, or at least 99% identical to any one of the amino acid sequences of SEQ ID NOs: 31-411 and 453-1304.

[0089] In certain embodiments, the instant disclosure provides a recombinant AAV capsid protein, wherein the amino acid in the capsid protein corresponding to amino acid positions 501 and 706 of SEQ ID NO: 14 is not the wild type amino acid, and wherein the recombinant AAV capsid protein comprises an amino acid sequence that is at least 70%, at least 75%, at least 80%, at least 85%, at least 86%, at least 87%, at least 88%, at least 89%, at least 90%, at least 91%, at least 92%, at least 93%, at least 94%, at least 95%, at least 96%, at least 97%, at least 98%, or at least 99% identical to the amino acid sequence of SEQ ID NOs: 1-30. In certain embodiments, the instant disclosure provides a recombinant AAV capsid protein, wherein the amino acid in the capsid protein corresponding to amino acid positions 501 and 706 of SEQ ID NO: 14 is not the wild type amino acid, and wherein the recombinant AAV capsid protein comprises an amino acid sequence that is at least 70%, at least 75%, at least 80%, at least 85%, at least 86%, at least 87%, at least 88%, at least 89%, at least 90%, at least 91%, at least 92%, at least 93%, at least 94%, at least 95%, at least 96%, at least 97%, at least 98%, or at least 99% identical to any one of the amino acid sequences of SEQ ID NOs: 31-411 and 453-1304.

[0090] In certain embodiments, the instant disclosure provides a recombinant AAV capsid protein, wherein the amino acid in the capsid protein corresponding to amino acid positions 505 and 705 of SEQ ID NO: 14 is not the wild type amino acid, and wherein the recombinant AAV capsid protein comprises an amino acid sequence that is at least 70%, at least 75%, at least 80%, at least 85%, at least 86%, at least 87%, at least 88%, at least 89%, at least 90%, at least 91%, at least 92%, at least 93%, at least 94%, at least 95%, at least 96%, at least 97%, at least 98%, or at least 99% identical to the amino acid sequence of SEQ ID NOs: 1-30. In certain embodiments, the instant disclosure provides a recombinant AAV capsid protein, wherein the amino acid in the capsid protein corresponding to amino acid positions 505 and 705 of SEQ ID NO: 14 is not the wild type amino acid, and wherein the recombinant AAV capsid protein comprises an amino acid sequence that is at least 70%, at least 75%, at least 80%, at least 85%, at least 86%, at least 87%, at least 88%, at least 89%, at least 90%, at least 91%, at least 92%, at least 93%, at least 94%, at least 95%, at least 96%, at least 97%, at least 98%, or at least 99% identical to any one of the amino acid sequences of SEQ ID NOs: 31-411 and 453-1304.

[0091] In certain embodiments, the instant disclosure provides a recombinant AAV capsid protein, wherein the amino acid in the capsid protein corresponding to amino acid positions 505 and 706 of SEQ ID NO: 14 is not the wild type amino acid, and wherein the recombinant AAV capsid protein comprises an amino acid sequence that is at least 70%, at least 75%, at least 80%, at least 85%, at least 86%, at least 87%, at least 88%, at least 89%, at least 90%, at least 91%, at least 92%, at least 93%, at least 94%, at least 95%, at least 96%, at least 97%, at least 98%, or at least 99% identical to the amino acid sequence of SEQ ID NOs: 1-30. In certain embodiments, the instant disclosure provides a recombinant AAV capsid protein, wherein the amino acid in the capsid protein corresponding to amino acid positions 505 and 706 of SEQ ID NO: 14 is not the wild type amino acid, and wherein the recombinant AAV capsid protein comprises an amino acid sequence that is at least 70%, at least 75%, at least 80%, at least 85%, at least 86%, at least 87%, at least 88%, at least 89%, at least 90%, at least 91%, at least 92%, at least 93%, at least 94%, at least 95%, at least 96%, at least 97%, at least 98%, or at least 99% identical to any one of the amino acid sequences of SEQ ID NOs: 31-411 and 453-1304.

[0092] In certain embodiments, the instant disclosure provides a recombinant AAV capsid protein, wherein the amino acid in the capsid protein corresponding to amino acid positions 705 and 706 of SEQ ID NO: 14 is not the wild type amino acid, and wherein the recombinant AAV capsid protein comprises an amino acid sequence that is at least 70%, at least 75%, at least 80%, at least 85%, at least 86%, at least 87%, at least 88%, at least 89%, at least 90%, at least 91%, at least 92%, at least 93%, at least 94%, at least 95%, at least 96%, at least 97%, at least 98%, or at least 99% identical to the amino acid sequence of SEQ ID NOs: 1-30. In certain embodiments, the instant disclosure provides a recombinant AAV capsid protein, wherein the amino acid in the capsid protein corresponding to amino acid positions 705 and 706 of SEQ ID NO: 14 is not the wild type amino acid, and wherein the recombinant AAV capsid protein comprises an amino acid sequence that is at least 70%, at least 75%, at least 80%, at least 85%, at least 86%, at least 87%, at least 88%, at least 89%, at least 90%, at least 91%, at least 92%, at least 93%, at least 94%, at least 95%, at least 96%, at least 97%, at least 98%, or at least 99% identical to any one of the amino acid sequences of SEQ ID NOs: 31-411 and 453-1304.

[0093] In certain embodiments, the instant disclosure provides a recombinant AAV capsid protein, wherein the amino acid in the capsid protein corresponding to amino acid positions 346, 501, and 505 of SEQ ID NO: 14 is not the wild type amino acid, and wherein the recombinant AAV capsid protein comprises an amino acid sequence that is at least 70%, at least 75%, at least 80%, at least 85%, at least 86%, at least 87%, at least 88%, at least 89%, at least 90%, at least 91%, at least 92%, at least 93%, at least 94%, at least 95%, at least 96%, at least 97%, at least 98%, or at least 99% identical to the amino acid sequence of SEQ ID NOs: 1-30. In certain embodiments, the instant disclosure provides a recombinant AAV capsid protein, wherein the amino acid in the capsid protein corresponding to amino acid positions 346, 501, and 505 of SEQ ID NO: 14 is not the wild type amino acid, and wherein the recombinant AAV capsid protein comprises an amino acid sequence that is at least 70%, at least 75%, at least 80%, at least 85%, at least 86%, at least 87%, at least 88%, at least 89%, at least 90%, at least 91%, at least 92%, at least 93%, at least 94%, at least 95%, at least 96%, at least 97%, at least 98%, or at least 99% identical to any one of the amino acid sequences of SEQ ID NOs: 31-411 and 453-1304.

[0094] In certain embodiments, the instant disclosure provides a recombinant AAV capsid protein, wherein the amino acid in the capsid protein corresponding to amino acid positions 346, 501, and 705 of SEQ ID NO: 14 is not the wild type amino acid, and wherein the recombinant AAV capsid protein comprises an amino acid sequence that is at least 70%, at least 75%, at least 80%, at least 85%, at least 86%, at least 87%, at least 88%, at least 89%, at least 90%, at least 91%, at least 92%, at least 93%, at least 94%, at least 95%, at least 96%, at least 97%, at least 98%, or at least 99% identical to the amino acid sequence of SEQ ID NOs: 1-30. In certain embodiments, the instant disclosure provides a recombinant AAV capsid protein, wherein the amino acid in the capsid protein corresponding to amino acid positions 346, 501, and 705 of SEQ ID NO: 14 is not the wild type amino acid, and wherein the recombinant AAV capsid protein comprises an amino acid sequence that is at least 70%, at least 75%, at least 80%, at least 85%, at least 86%, at least 87%, at least 88%, at least 89%, at least 90%, at least 91%, at least 92%, at least 93%, at least 94%, at least 95%, at least 96%, at least 97%, at least 98%, or at least 99% identical to any one of the amino acid sequences of SEQ ID NOs: 31-411 and 453-1304.

[0095] In certain embodiments, the instant disclosure provides a recombinant AAV capsid protein, wherein the amino acid in the capsid protein corresponding to amino acid positions 346, 501, and 706 of SEQ ID NO: 14 is not the wild type amino acid, and wherein the recombinant AAV capsid protein comprises an amino acid sequence that is at least 70%, at least 75%, at least 80%, at least 85%, at least 86%, at least 87%, at least 88%, at least 89%, at least 90%, at least 91%, at least 92%, at least 93%, at least 94%, at least 95%, at least 96%, at least 97%, at least 98%, or at least 99% identical to the amino acid sequence of SEQ ID NOs: 1-30. In certain embodiments, the instant disclosure provides a recombinant AAV capsid protein, wherein the amino acid in the capsid protein corresponding to amino acid positions 346, 501, and 706 of SEQ ID NO: 14 is not the wild type amino acid, and wherein the recombinant AAV capsid protein comprises an amino acid sequence that is at least 70%, at least 75%, at least 80%, at least 85%, at least 86%, at least 87%, at least 88%, at least 89%, at least 90%, at least 91%, at least 92%, at least 93%, at least 94%, at least 95%, at least 96%, at least 97%, at least 98%, or at least 99% identical to any one of the amino acid sequences of SEQ ID NOs: 31-411 and 453-1304.

[0096] In certain embodiments, the instant disclosure provides a recombinant AAV capsid protein, wherein the amino acid in the capsid protein corresponding to amino acid positions 346, 505, and 705 of SEQ ID NO: 14 is not the wild type amino acid, and wherein the recombinant AAV capsid protein comprises an amino acid sequence that is at least 70%, at least 75%, at least 80%, at least 85%, at least 86%, at least 87%, at least 88%, at least 89%, at least 90%, at least 91%, at least 92%, at least 93%, at least 94%, at least 95%, at least 96%, at least 97%, at least 98%, or at least 99% identical to the amino acid sequence of SEQ ID NOs: 1-30. In certain embodiments, the instant disclosure provides a recombinant AAV capsid protein, wherein the amino acid in the capsid protein corresponding to amino acid positions 346, 505, and 705 of SEQ ID NO: 14 is not the wild type amino acid, and wherein the recombinant AAV capsid protein comprises an amino acid sequence that is at least 70%, at least 75%, at least 80%, at least 85%, at least 86%, at least 87%, at least 88%, at least 89%, at least 90%, at least 91%, at least 92%, at least 93%, at least 94%, at least 95%, at least 96%, at least 97%, at least 98%, or at least 99% identical to any one of the amino acid sequences of SEQ ID NOs: 31-411 and 453-1304.

[0097] In certain embodiments, the instant disclosure provides a recombinant AAV capsid protein, wherein the amino acid in the capsid protein corresponding to amino acid positions 346, 505, and 706 of SEQ ID NO: 14 is not the wild type amino acid, and wherein the recombinant AAV capsid protein comprises an amino acid sequence that is at least 70%, at least 75%, at least 80%, at least 85%, at least 86%, at least 87%, at least 88%, at least 89%, at least 90%, at least 91%, at least 92%, at least 93%, at least 94%, at least 95%, at least 96%, at least 97%, at least 98%, or at least 99% identical to the amino acid sequence of SEQ ID NOs: 1-30. In certain embodiments, the instant disclosure provides a recombinant AAV capsid protein, wherein the amino acid in the capsid protein corresponding to amino acid positions 346, 505, and 706 of SEQ ID NO: 14 is not the wild type amino acid, and wherein the recombinant AAV capsid protein comprises an amino acid sequence that is at least 70%, at least 75%, at least 80%, at least 85%, at least 86%, at least 87%, at least 88%, at least 89%, at least 90%, at least 91%, at least 92%, at least 93%, at least 94%, at least 95%, at least 96%, at least 97%, at least 98%, or at least 99% identical to any one of the amino acid sequences of SEQ ID NOs: 31-411 and 453-1304.

[0098] In certain embodiments, the instant disclosure provides a recombinant AAV capsid protein, wherein the amino acid in the capsid protein corresponding to amino acid positions 346, 705, and 706 of SEQ ID NO: 14 is not the wild type amino acid, and wherein the recombinant AAV capsid protein comprises an amino acid sequence that is at least 70%, at least 75%, at least 80%, at least 85%, at least 86%, at least 87%, at least 88%, at least 89%, at least 90%, at least 91%, at least 92%, at least 93%, at least 94%, at least 95%, at least 96%, at least 97%, at least 98%, or at least 99% identical to the amino acid sequence of SEQ ID NOs: 1-30. In certain embodiments, the instant disclosure provides a recombinant AAV capsid protein, wherein the amino acid in the capsid protein corresponding to amino acid positions 346, 705, and 706 of SEQ ID NO: 14 is not the wild type amino acid, and wherein the recombinant AAV capsid protein comprises an amino acid sequence that is at least 70%, at least 75%, at least 80%, at least 85%, at least 86%, at least 87%, at least 88%, at least 89%, at least 90%, at least 91%, at least 92%, at least 93%, at least 94%, at least 95%, at least 96%, at least 97%, at least 98%, or at least 99% identical to any one of the amino acid sequences of SEQ ID NOs: 31-411 and 453-1304.

[0099] In certain embodiments, the instant disclosure provides a recombinant AAV capsid protein, wherein the amino acid in the capsid protein corresponding to amino acid positions 501, 505, and 705 of SEQ ID NO: 14 is not the wild type amino acid, and wherein the recombinant AAV capsid protein comprises an amino acid sequence that is at least 70%, at least 75%, at least 80%, at least 85%, at least 86%, at least 87%, at least 88%, at least 89%, at least 90%, at least 91%, at least 92%, at least 93%, at least 94%, at least 95%, at least 96%, at least 97%, at least 98%, or at least 99% identical to the amino acid sequence of SEQ ID NOs: 1-30. In certain embodiments, the instant disclosure provides a recombinant AAV capsid protein, wherein the amino acid in the capsid protein corresponding to amino acid positions 501, 505, and 705 of SEQ ID NO: 14 is not the wild type amino acid, and wherein the recombinant AAV capsid protein comprises an amino acid sequence that is at least 70%, at least 75%, at least 80%, at least 85%, at least 86%, at least 87%, at least 88%, at least 89%, at least 90%, at least 91%, at least 92%, at least 93%, at least 94%, at least 95%, at least 96%, at least 97%, at least 98%, or at least 99% identical to any one of the amino acid sequences of SEQ ID NOs: 31-411 and 453-1304.

[0100] In certain embodiments, the instant disclosure provides a recombinant AAV capsid protein, wherein the amino acid in the capsid protein corresponding to amino acid positions 501, 505, and 706 of SEQ ID NO: 14 is not the wild type amino acid, and wherein the recombinant AAV capsid protein comprises an amino acid sequence that is at least 70%, at least 75%, at least 80%, at least 85%, at least 86%, at least 87%, at least 88%, at least 89%, at least 90%, at least 91%, at least 92%, at least 93%, at least 94%, at least 95%, at least 96%, at least 97%, at least 98%, or at least 99% identical to the amino acid sequence of SEQ ID NOs: 1-30. In certain embodiments, the instant disclosure provides a recombinant AAV capsid protein, wherein the amino acid in the capsid protein corresponding to amino acid positions 501, 505, and 706 of SEQ ID NO: 14 is not the wild type amino acid, and wherein the recombinant AAV capsid protein comprises an amino acid sequence that is at least 70%, at least 75%, at least 80%, at least 85%, at least 86%, at least 87%, at least 88%, at least 89%, at least 90%, at least 91%, at least 92%, at least 93%, at least 94%, at least 95%, at least 96%, at least 97%, at least 98%, or at least 99% identical to any one of the amino acid sequences of SEQ ID NOs: 31-411 and 453-1304.

[0101] In certain embodiments, the instant disclosure provides a recombinant AAV capsid protein, wherein the amino acid in the capsid protein corresponding to amino acid positions 501, 705, and 706 of SEQ ID NO: 14 is not the wild type amino acid, and wherein the recombinant AAV capsid protein comprises an amino acid sequence that is at least 70%, at least 75%, at least 80%, at least 85%, at least 86%, at least 87%, at least 88%, at least 89%, at least 90%, at least 91%, at least 92%, at least 93%, at least 94%, at least 95%, at least 96%, at least 97%, at least 98%, or at least 99% identical to the amino acid sequence of SEQ ID NOs: 1-30. In certain embodiments, the instant disclosure provides a recombinant AAV capsid protein, wherein the amino acid in the capsid protein corresponding to amino acid positions 501, 705, and 706 of SEQ ID NO: 14 is not the wild type amino acid, and wherein the recombinant AAV capsid protein comprises an amino acid sequence that is at least 70%, at least 75%, at least 80%, at least 85%, at least 86%, at least 87%, at least 88%, at least 89%, at least 90%, at least 91%, at least 92%, at least 93%, at least 94%, at least 95%, at least 96%, at least 97%, at least 98%, or at least 99% identical to any one of the amino acid sequences of SEQ ID NOs: 31-411 and 453-1304.

[0102] In certain embodiments, the instant disclosure provides a recombinant AAV capsid protein, wherein the amino acid in the capsid protein corresponding to amino acid positions 505, 705, and 706 of SEQ ID NO: 14 is not the wild type amino acid, and wherein the recombinant AAV capsid protein comprises an amino acid sequence that is at least 70%, at least 75%, at least 80%, at least 85%, at least 86%, at least 87%, at least 88%, at least 89%, at least 90%, at least 91%, at least 92%, at least 93%, at least 94%, at least 95%, at least 96%, at least 97%, at least 98%, or at least 99% identical to the amino acid sequence of SEQ ID NOs: 1-30. In certain embodiments, the instant disclosure provides a recombinant AAV capsid protein, wherein the amino acid in the capsid protein corresponding to amino acid positions 505, 705, and 706 of SEQ ID NO: 14 is not the wild type amino acid, and wherein the recombinant AAV capsid protein comprises an amino acid sequence that is at least 70%, at least 75%, at least 80%, at least 85%, at least 86%, at least 87%, at least 88%, at least 89%, at least 90%, at least 91%, at least 92%, at least 93%, at least 94%, at least 95%, at least 96%, at least 97%, at least 98%, or at least 99% identical to any one of the amino acid sequences of SEQ ID NOs: 31-411 and 453-1304.

[0103] In certain embodiments, the instant disclosure provides a recombinant AAV capsid protein, wherein the amino acid in the capsid protein corresponding to amino acid positions 346, 501, 705, and 706 of SEQ ID NO: 14 is not the wild type amino acid, and wherein the recombinant AAV capsid protein comprises an amino acid sequence that is at least 70%, at least 75%, at least 80%, at least 85%, at least 86%, at least 87%, at least 88%, at least 89%, at least 90%, at least 91%, at least 92%, at least 93%, at least 94%, at least 95%, at least 96%, at least 97%, at least 98%, or at least 99% identical to the amino acid sequence of SEQ ID NOs: 1-30. In certain embodiments, the instant disclosure provides a recombinant AAV capsid protein, wherein the amino acid in the capsid protein corresponding to amino acid positions 346, 501, 705, and 706 of SEQ ID NO: 14 is not the wild type amino acid, and wherein the recombinant AAV capsid protein comprises an amino acid sequence that is at least 70%, at least 75%, at least 80%, at least 85%, at least 86%, at least 87%, at least 88%, at least 89%, at least 90%, at least 91%, at least 92%, at least 93%, at least 94%, at least 95%, at least 96%, at least 97%, at least 98%, or at least 99% identical to any one of the amino acid sequences of SEQ ID NOs: 31-411 and 453-1304.

[0104] In certain embodiments, the instant disclosure provides a recombinant AAV capsid protein, wherein the amino acid in the capsid protein corresponding to amino acid positions 346, 501, 505, and 706 of SEQ ID NO: 14 is not the wild type amino acid, and wherein the recombinant AAV capsid protein comprises an amino acid sequence that is at least 70%, at least 75%, at least 80%, at least 85%, at least 86%, at least 87%, at least 88%, at least 89%, at least 90%, at least 91%, at least 92%, at least 93%, at least 94%, at least 95%, at least 96%, at least 97%, at least 98%, or at least 99% identical to the amino acid sequence of SEQ ID NOs: 1-30. In certain embodiments, the instant disclosure provides a recombinant AAV capsid protein, wherein the amino acid in the capsid protein corresponding to amino acid positions 346, 501, 505, and 706 of SEQ ID NO: 14 is not the wild type amino acid, and wherein the recombinant AAV capsid protein comprises an amino acid sequence that is at least 70%, at least 75%, at least 80%, at least 85%, at least 86%, at least 87%, at least 88%, at least 89%, at least 90%, at least 91%, at least 92%, at least 93%, at least 94%, at least 95%, at least 96%, at least 97%, at least 98%, or at least 99% identical to any one of the amino acid sequences of SEQ ID NOs: 31-411 and 453-1304.

[0105] In certain embodiments, the instant disclosure provides a recombinant AAV capsid protein, wherein the amino acid in the capsid protein corresponding to amino acid positions 346, 505, 705, and 706 of SEQ ID NO: 14 is not the wild type amino acid, and wherein the recombinant AAV capsid protein comprises an amino acid sequence that is at least 70%, at least 75%, at least 80%, at least 85%, at least 86%, at least 87%, at least 88%, at least 89%, at least 90%, at least 91%, at least 92%, at least 93%, at least 94%, at least 95%, at least 96%, at least 97%, at least 98%, or at least 99% identical to the amino acid sequence of SEQ ID NOs: 1-30. In certain embodiments, the instant disclosure provides a recombinant AAV capsid protein, wherein the amino acid in the capsid protein corresponding to amino acid positions 346, 505, 705, and 706 of SEQ ID NO: 14 is not the wild type amino acid, and wherein the recombinant AAV capsid protein comprises an amino acid sequence that is at least 70%, at least 75%, at least 80%, at least 85%, at least 86%, at least 87%, at least 88%, at least 89%, at least 90%, at least 91%, at least 92%, at least 93%, at least 94%, at least 95%, at least 96%, at least 97%, at least 98%, or at least 99% identical to any one of the amino acid sequences of SEQ ID NOs: 31-411 and 453-1304.

[0106] In certain embodiments, the instant disclosure provides a recombinant AAV capsid protein, wherein the amino acid in the capsid protein corresponding to amino acid positions 346, 501, 505, 705, and 706 of SEQ ID NO: 14 is not the wild type amino acid, and wherein the recombinant AAV capsid protein comprises an amino acid sequence that is at least 70%, at least 75%, at least 80%, at least 85%, at least 86%, at least 87%, at least 88%, at least 89%, at least 90%, at least 91%, at least 92%, at least 93%, at least 94%, at least 95%, at least 96%, at least 97%, at least 98%, or at least 99% identical to the amino acid sequence of SEQ ID NOs: 1-30. In certain embodiments, the instant disclosure provides a recombinant AAV capsid protein, wherein the amino acid in the capsid protein corresponding to amino acid positions 346, 501, 505, 705, and 706 of SEQ ID NO: 14 is not the wild type amino acid, and wherein the recombinant AAV capsid protein comprises an amino acid sequence that is at least 70%, at least 75%, at least 80%, at least 85%, at least 86%, at least 87%, at least 88%, at least 89%, at least 90%, at least 91%, at least 92%, at least 93%, at least 94%, at least 95%, at least 96%, at least 97%, at least 98%, or at least 99% identical to any one of the amino acid sequences of SEQ ID NOs: 31-411 and 453-1304.

[0107] In certain embodiments, the instant disclosure provides a recombinant adeno-associated virus (AAV) capsid protein, wherein: the amino acid in the capsid protein corresponding to amino acid position 346 of SEQ ID NO: 14 is alanine or glycine; the amino acid in the capsid protein corresponding to amino acid position 501 of SEQ ID NO: 14 is isoleucine; the amino acid in the capsid protein corresponding to amino acid position 505 of SEQ ID NO: 14 is arginine; the amino acid in the capsid protein corresponding to amino acid position 705 of SEQ ID NO: 14 is leucine; and/or the amino acid in the capsid protein corresponding to amino acid position 706 of SEQ ID NO: 14 is cysteine; wherein the capsid protein does not comprise the amino acid sequence of amino acids 203-736 of SEQ ID NOs: 11-15; and wherein the recombinant AAV capsid protein comprises an amino acid sequence that is at least 70%, at least 75%, at least 80%, at least 85%, at least 86%, at least 87%, at least 88%, at least 89%, at least 90%, at least 91%, at least 92%, at least 93%, at least 94%, at least 95%, at least 96%, at least 97%, at least 98%, or at least 99% identical to the amino acid sequence of SEQ ID NOs: 1-30. In certain embodiments, the instant disclosure provides a recombinant adeno-associated virus (AAV) capsid protein, wherein: the amino acid in the capsid protein corresponding to amino acid position 346 of SEQ ID NO: 14 is alanine or glycine; the amino acid in the capsid protein corresponding to amino acid position 501 of SEQ ID NO: 14 is isoleucine; the amino acid in the capsid protein corresponding to amino acid position 505 of SEQ ID NO: 14 is arginine; the amino acid in the capsid protein corresponding to amino acid position 705 of SEQ ID NO: 14 is leucine; and/or the amino acid in the capsid protein corresponding to amino acid position 706 of SEQ ID NO: 14 is cysteine, and wherein the capsid protein comprises an amino acid sequence that is at least 70%, at least 75%, at least 80%, at least 85%, at least 86%, at least 87%, at least 88%, at least 89%, at least 90%, at least 91%, at least 92%, at least 93%, at least 94%, at least 95%, at least 96%, at least 97%, at least 98%, or at least 99% identical to any one of the amino acid sequences of SEQ ID NOs: 31-411 and 453-1304.

[0108] In certain embodiments, the amino acid in the capsid protein corresponding to amino acid position 501 of SEQ ID NO: 14 is leucine, threonine, tyrosine, or tryptophan.

[0109] In certain embodiments, the instant disclosure provides a recombinant adeno-associated virus (AAV) capsid protein, wherein: the amino acid in the capsid protein corresponding to amino acid position 346 of SEQ ID NO: 14 is alanine, and wherein the capsid protein does not comprise the amino acid sequence of amino acids 203-736 of SEQ ID NOs: 11-15; and wherein the recombinant AAV capsid protein comprises an amino acid sequence that is at least 70%, at least 75%, at least 80%, at least 85%, at least 86%, at least 87%, at least 88%, at least 89%, at least 90%, at least 91%, at least 92%, at least 93%, at least 94%, at least 95%, at least 96%, at least 97%, at least 98%, or at least 99% identical to the amino acid sequence of SEQ ID NOs: 1-30. In certain embodiments, the instant disclosure provides a recombinant adeno-associated virus (AAV) capsid protein, wherein: the amino acid in the capsid protein corresponding to amino acid position 346 of SEQ ID NO: 14 is alanine, and wherein the capsid protein comprises an amino acid sequence that is at least 70%, at least 75%, at least 80%, at least 85%, at least 86%, at least 87%, at least 88%, at least 89%, at least 90%, at least 91%, at least 92%, at least 93%, at least 94%, at least 95%, at least 96%, at least 97%, at least 98%, or at least 99% identical to any one of the amino acid sequences of SEQ ID NOs: 31-411 and 453-1304.

[0110] In certain embodiments, the instant disclosure provides a recombinant adeno-associated virus (AAV) capsid protein, wherein: the amino acid in the capsid protein corresponding to amino acid position 346 of SEQ ID NO: 14 is glycine, and wherein the capsid protein does not comprise the amino acid sequence of amino acids 203-736 of SEQ ID NOs: 11-15; and wherein the recombinant AAV capsid protein comprises an amino acid sequence that is at least 70%, at least 75%, at least 80%, at least 85%, at least 86%, at least 87%, at least 88%, at least 89%, at least 90%, at least 91%, at least 92%, at least 93%, at least 94%, at least 95%, at least 96%, at least 97%, at least 98%, or at least 99% identical to the amino acid sequence of SEQ ID NOs: 1-30. In certain embodiments, the instant disclosure provides a recombinant adeno-associated virus (AAV) capsid protein, wherein: the amino acid in the capsid protein corresponding to amino acid position 346 of SEQ ID NO: 14 is glycine, and wherein the capsid protein comprises an amino acid sequence that is at least 70%, at least 75%, at least 80%, at least 85%, at least 86%, at least 87%, at least 88%, at least 89%, at least 90%, at least 91%, at least 92%, at least 93%, at least 94%, at least 95%, at least 96%, at least 97%, at least 98%, or at least 99% identical to any one of the amino acid sequences of SEQ ID NOs: 31-411 and 453-1304.

[0111] In certain embodiments, the instant disclosure provides a recombinant adeno-associated virus (AAV) capsid protein, wherein: the amino acid in the capsid protein corresponding to amino acid position 501 of SEQ ID NO: 14 is isoleucine; wherein the capsid protein does not comprise the amino acid sequence of amino acids 203-736 of SEQ ID NOs: 11-15; and wherein the recombinant AAV capsid protein comprises an amino acid sequence that is at least 70%, at least 75%, at least 80%, at least 85%, at least 86%, at least 87%, at least 88%, at least 89%, at least 90%, at least 91%, at least 92%, at least 93%, at least 94%, at least 95%, at least 96%, at least 97%, at least 98%, or at least 99% identical to the amino acid sequence of SEQ ID NOs: 1-30. In certain embodiments, the instant disclosure provides a recombinant adeno-associated virus (AAV) capsid protein, wherein: the amino acid in the capsid protein corresponding to amino acid position 501 of SEQ ID NO: 14 is isoleucine, and wherein the capsid protein comprises an amino acid sequence that is at least 70%, at least 75%, at least 80%, at least 85%, at least 86%, at least 87%, at least 88%, at least 89%, at least 90%, at least 91%, at least 92%, at least 93%, at least 94%, at least 95%, at least 96%, at least 97%, at least 98%, or at least 99% identical to any one of the amino acid sequences of SEQ ID NOs: 31-411 and 453-1304.

[0112] In certain embodiments, the instant disclosure provides a recombinant adeno-associated virus (AAV) capsid protein, wherein: the amino acid in the capsid protein corresponding to amino acid position 501 of SEQ ID NO: 14 is leucine; wherein the capsid protein does not comprise the amino acid sequence of amino acids 203-736 of SEQ ID NOs: 11-15; and wherein the recombinant AAV capsid protein comprises an amino acid sequence that is at least 70%, at least 75%, at least 80%, at least 85%, at least 86%, at least 87%, at least 88%, at least 89%, at least 90%, at least 91%, at least 92%, at least 93%, at least 94%, at least 95%, at least 96%, at least 97%, at least 98%, or at least 99% identical to the amino acid sequence of SEQ ID NOs: 1-30. In certain embodiments, the instant disclosure provides a recombinant adeno-associated virus (AAV) capsid protein, wherein: the amino acid in the capsid protein corresponding to amino acid position 501 of SEQ ID NO: 14 is leucine, and wherein the capsid protein comprises an amino acid sequence that is at least 70%, at least 75%, at least 80%, at least 85%, at least 86%, at least 87%, at least 88%, at least 89%, at least 90%, at least 91%, at least 92%, at least 93%, at least 94%, at least 95%, at least 96%, at least 97%, at least 98%, or at least 99% identical to any one of the amino acid sequences of SEQ ID NOs: 31-411 and 453-1304.

[0113] In certain embodiments, the instant disclosure provides a recombinant adeno-associated virus (AAV) capsid protein, wherein: the amino acid in the capsid protein corresponding to amino acid position 501 of SEQ ID NO: 14 is threonine; wherein the capsid protein does not comprise the amino acid sequence of amino acids 203-736 of SEQ ID NOs: 11-15; and wherein the recombinant AAV capsid protein comprises an amino acid sequence that is at least 70%, at least 75%, at least 80%, at least 85%, at least 86%, at least 87%, at least 88%, at least 89%, at least 90%, at least 91%, at least 92%, at least 93%, at least 94%, at least 95%, at least 96%, at least 97%, at least 98%, or at least 99% identical to the amino acid sequence of SEQ ID NOs: 1-30. In certain embodiments, the instant disclosure provides a recombinant adeno-associated virus (AAV) capsid protein, wherein: the amino acid in the capsid protein corresponding to amino acid position 501 of SEQ ID NO: 14 is threonine, and wherein the capsid protein comprises an amino acid sequence that is at least 70%, at least 75%, at least 80%, at least 85%, at least 86%, at least 87%, at least 88%, at least 89%, at least 90%, at least 91%, at least 92%, at least 93%, at least 94%, at least 95%, at least 96%, at least 97%, at least 98%, or at least 99% identical to any one of the amino acid sequences of SEQ ID NOs: 31-411 and 453-1304.

[0114] In certain embodiments, the instant disclosure provides a recombinant adeno-associated virus (AAV) capsid protein, wherein: the amino acid in the capsid protein corresponding to amino acid position 501 of SEQ ID NO: 14 is tryptophan; wherein the capsid protein does not comprise the amino acid sequence of amino acids 203-736 of SEQ ID NOs: 11-15; and wherein the recombinant AAV capsid protein comprises an amino acid sequence that is at least 70%, at least 75%, at least 80%, at least 85%, at least 86%, at least 87%, at least 88%, at least 89%, at least 90%, at least 91%, at least 92%, at least 93%, at least 94%, at least 95%, at least 96%, at least 97%, at least 98%, or at least 99% identical to the amino acid sequence of SEQ ID NOs: 1-30. In certain embodiments, the instant disclosure provides a recombinant adeno-associated virus (AAV) capsid protein, wherein: the amino acid in the capsid protein corresponding to amino acid position 501 of SEQ ID NO: 14 is tryptophan, and wherein the capsid protein comprises an amino acid sequence that is at least 70%, at least 75%, at least 80%, at least 85%, at least 86%, at least 87%, at least 88%, at least 89%, at least 90%, at least 91%, at least 92%, at least 93%, at least 94%, at least 95%, at least 96%, at least 97%, at least 98%, or at least 99% identical to any one of the amino acid sequences of SEQ ID NOs: 31-411 and 453-1304.

[0115] In certain embodiments, the instant disclosure provides a recombinant adeno-associated virus (AAV) capsid protein, wherein: the amino acid in the capsid protein corresponding to amino acid position 501 of SEQ ID NO: 14 is tyrosine; wherein the capsid protein does not comprise the amino acid sequence of amino acids 203-736 of SEQ ID NOs: 11-15; and wherein the recombinant AAV capsid protein comprises an amino acid sequence that is at least 70%, at least 75%, at least 80%, at least 85%, at least 86%, at least 87%, at least 88%, at least 89%, at least 90%, at least 91%, at least 92%, at least 93%, at least 94%, at least 95%, at least 96%, at least 97%, at least 98%, or at least 99% identical to the amino acid sequence of SEQ ID NOs: 1-30. In certain embodiments, the instant disclosure provides a recombinant adeno-associated virus (AAV) capsid protein, wherein: the amino acid in the capsid protein corresponding to amino acid position 501 of SEQ ID NO: 14 is tyrosine, and wherein the capsid protein comprises an amino acid sequence that is at least 70%, at least 75%, at least 80%, at least 85%, at least 86%, at least 87%, at least 88%, at least 89%, at least 90%, at least 91%, at least 92%, at least 93%, at least 94%, at least 95%, at least 96%, at least 97%, at least 98%, or at least 99% identical to any one of the amino acid sequences of SEQ ID NOs: 31-411 and 453-1304.

[0116] In certain embodiments, the instant disclosure provides a recombinant adeno-associated virus (AAV) capsid protein, wherein: the amino acid in the capsid protein corresponding to amino acid position 505 of SEQ ID NO: 14 is arginine; wherein the capsid protein does not comprise the amino acid sequence of amino acids 203-736 of SEQ ID NOs: 11-15; and wherein the recombinant AAV capsid protein comprises an amino acid sequence that is at least 70%, at least 75%, at least 80%, at least 85%, at least 86%, at least 87%, at least 88%, at least 89%, at least 90%, at least 91%, at least 92%, at least 93%, at least 94%, at least 95%, at least 96%, at least 97%, at least 98%, or at least 99% identical to the amino acid sequence of SEQ ID NOs: 1-30. In certain embodiments, the instant disclosure provides a recombinant adeno-associated virus (AAV) capsid protein, wherein: the amino acid in the capsid protein corresponding to amino acid position 505 of SEQ ID NO: 14 is arginine, and wherein the capsid protein comprises an amino acid sequence that is at least 70%, at least 75%, at least 80%, at least 85%, at least 86%, at least 87%, at least 88%, at least 89%, at least 90%, at least 91%, at least 92%, at least 93%, at least 94%, at least 95%, at least 96%, at least 97%, at least 98%, or at least 99% identical to any one of the amino acid sequences of SEQ ID NOs: 31-411 and 453-1304.

[0117] In certain embodiments, the instant disclosure provides a recombinant adeno-associated virus (AAV) capsid protein, wherein: the amino acid in the capsid protein corresponding to amino acid position 705 of SEQ ID NO: 14 is leucine; wherein the capsid protein does not comprise the amino acid sequence of amino acids 203-736 of SEQ ID NOs: 11-15; and wherein the recombinant AAV capsid protein comprises an amino acid sequence that is at least 70%, at least 75%, at least 80%, at least 85%, at least 86%, at least 87%, at least 88%, at least 89%, at least 90%, at least 91%, at least 92%, at least 93%, at least 94%, at least 95%, at least 96%, at least 97%, at least 98%, or at least 99% identical to the amino acid sequence of SEQ ID NOs: 1-30. In certain embodiments, the instant disclosure provides a recombinant adeno-associated virus (AAV) capsid protein, wherein: the amino acid in the capsid protein corresponding to amino acid position 705 of SEQ ID NO: 14 is leucine, and wherein the capsid protein comprises an amino acid sequence that is at least 70%, at least 75%, at least 80%, at least 85%, at least 86%, at least 87%, at least 88%, at least 89%, at least 90%, at least 91%, at least 92%, at least 93%, at least 94%, at least 95%, at least 96%, at least 97%, at least 98%, or at least 99% identical to any one of the amino acid sequences of SEQ ID NOs: 31-411 and 453-1304.

[0118] In certain embodiments, the instant disclosure provides a recombinant adeno-associated virus (AAV) capsid protein, wherein: the amino acid in the capsid protein corresponding to amino acid position 706 of SEQ ID NO: 14 is cysteine; wherein the capsid protein does not comprise the amino acid sequence of amino acids 203-736 of SEQ ID NOs: 11-15; and wherein the recombinant AAV capsid protein comprises an amino acid sequence that is at least 70%, at least 75%, at least 80%, at least 85%, at least 86%, at least 87%, at least 88%, at least 89%, at least 90%, at least 91%, at least 92%, at least 93%, at least 94%, at least 95%, at least 96%, at least 97%, at least 98%, or at least 99% identical to the amino acid sequence of SEQ ID NOs: 1-30. In certain embodiments, the instant disclosure provides a recombinant adeno-associated virus (AAV) capsid protein, wherein: the amino acid in the capsid protein corresponding to amino acid position 706 of SEQ ID NO: 14 is cysteine, and wherein the capsid protein comprises an amino acid sequence that is at least 70%, at least 75%, at least 80%, at least 85%, at least 86%, at least 87%, at least 88%, at least 89%, at least 90%, at least 91%, at least 92%, at least 93%, at least 94%, at least 95%, at least 96%, at least 97%, at least 98%, or at least 99% identical to any one of the amino acid sequences of SEQ ID NOs: 31-411 and 453-1304.

[0119] In certain embodiments, the instant disclosure provides a recombinant adeno-associated virus (AAV) capsid protein, wherein: the amino acid in the capsid protein corresponding to amino acid position 346 of SEQ ID NO: 14 is alanine; and the amino acid in the capsid protein corresponding to amino acid position 501 of SEQ ID NO: 14 is isoleucine, and wherein the capsid protein does not comprise the amino acid sequence of amino acids 203-736 of SEQ ID NOs: 11-15; and wherein the recombinant AAV capsid protein comprises an amino acid sequence that is at least 70%, at least 75%, at least 80%, at least 85%, at least 86%, at least 87%, at least 88%, at least 89%, at least 90%, at least 91%, at least 92%, at least 93%, at least 94%, at least 95%, at least 96%, at least 97%, at least 98%, or at least 99% identical to the amino acid sequence of SEQ ID NOs: 1-30. In certain embodiments, the instant disclosure provides a recombinant adeno-associated virus (AAV) capsid protein, wherein: the amino acid in the capsid protein corresponding to amino acid position 346 of SEQ ID NO: 14 is alanine; and the amino acid in the capsid protein corresponding to amino acid position 501 of SEQ ID NO: 14 is isoleucine; and the amino acid in the capsid protein corresponding to amino acid position 505 of SEQ ID NO: 14 is arginine, and wherein the capsid protein comprises an amino acid sequence that is at least 70%, at least 75%, at least 80%, at least 85%, at least 86%, at least 87%, at least 88%, at least 89%, at least 90%, at least 91%, at least 92%, at least 93%, at least 94%, at least 95%, at least 96%, at least 97%, at least 98%, or at least 99% identical to any one of the amino acid sequences of SEQ ID NOs: 31-411 and 453-1304.

[0120] In certain embodiments, the instant disclosure provides a recombinant adeno-associated virus (AAV) capsid protein, wherein: the amino acid in the capsid protein corresponding to amino acid position 346 of SEQ ID NO: 14 is alanine; and the amino acid in the capsid protein corresponding to amino acid position 505 of SEQ ID NO: 14 is arginine, and wherein the capsid protein does not comprise the amino acid sequence of amino acids 203-736 of SEQ ID NOs: 11-15; and wherein the recombinant AAV capsid protein comprises an amino acid sequence that is at least 70%, at least 75%, at least 80%, at least 85%, at least 86%, at least 87%, at least 88%, at least 89%, at least 90%, at least 91%, at least 92%, at least 93%, at least 94%, at least 95%, at least 96%, at least 97%, at least 98%, or at least 99% identical to the amino acid sequence of SEQ ID NOs: 1-30. In certain embodiments, the instant disclosure provides a recombinant adeno-associated virus (AAV) capsid protein, wherein: the amino acid in the capsid protein corresponding to amino acid position 346 of SEQ ID NO: 14 is alanine; and the amino acid in the capsid protein corresponding to amino acid position 505 of SEQ ID NO: 14 is arginine; and the amino acid in the capsid protein corresponding to amino acid position 505 of SEQ ID NO: 14 is arginine, and wherein the capsid protein comprises an amino acid sequence that is at least 70%, at least 75%, at least 80%, at least 85%, at least 86%, at least 87%, at least 88%, at least 89%, at least 90%, at least 91%, at least 92%, at least 93%, at least 94%, at least 95%, at least 96%, at least 97%, at least 98%, or at least 99% identical to any one of the amino acid sequences of SEQ ID NOs: 31-411 and 453-1304.

[0121] In certain embodiments, the instant disclosure provides a recombinant adeno-associated virus (AAV) capsid protein, wherein: the amino acid in the capsid protein corresponding to amino acid position 346 of SEQ ID NO: 14 is alanine; and the amino acid in the capsid protein corresponding to amino acid position 706 of SEQ ID NO: 14 is cysteine, and wherein the capsid protein does not comprise the amino acid sequence of amino acids 203-736 of SEQ ID NOs: 11-15; and wherein the recombinant AAV capsid protein comprises an amino acid sequence that is at least 70%, at least 75%, at least 80%, at least 85%, at least 86%, at least 87%, at least 88%, at least 89%, at least 90%, at least 91%, at least 92%, at least 93%, at least 94%, at least 95%, at least 96%, at least 97%, at least 98%, or at least 99% identical to the amino acid sequence of SEQ ID NOs: 1-30. In certain embodiments, the instant disclosure provides a recombinant adeno-associated virus (AAV) capsid protein, wherein: the amino acid in the capsid protein corresponding to amino acid position 346 of SEQ ID NO: 14 is alanine; and the amino acid in the capsid protein corresponding to amino acid position 706 of SEQ ID NO: 14 is cysteine; and the amino acid in the capsid protein corresponding to amino acid position 505 of SEQ ID NO: 14 is arginine, and wherein the capsid protein comprises an amino acid sequence that is at least 70%, at least 75%, at least 80%, at least 85%, at least 86%, at least 87%, at least 88%, at least 89%, at least 90%, at least 91%, at least 92%, at least 93%, at least 94%, at least 95%, at least 96%, at least 97%, at least 98%, or at least 99% identical to any one of the amino acid sequences of SEQ ID NOs: 31-411 and 453-1304.

[0122] In certain embodiments, the instant disclosure provides a recombinant adeno-associated virus (AAV) capsid protein, wherein: the amino acid in the capsid protein corresponding to amino acid position 501 of SEQ ID NO: 14 is isoleucine; and the amino acid in the capsid protein corresponding to amino acid position 505 of SEQ ID NO: 14 is arginine; wherein the capsid protein does not comprise the amino acid sequence of amino acids 203-736 of SEQ ID NOs: 11-15; and wherein the recombinant AAV capsid protein comprises an amino acid sequence that is at least 70%, at least 75%, at least 80%, at least 85%, at least 86%, at least 87%, at least 88%, at least 89%, at least 90%, at least 91%, at least 92%, at least 93%, at least 94%, at least 95%, at least 96%, at least 97%, at least 98%, or at least 99% identical to the amino acid sequence of SEQ ID NOs: 1-30. In certain embodiments, the instant disclosure provides a recombinant adeno-associated virus (AAV) capsid protein, wherein: the amino acid in the capsid protein corresponding to amino acid position 501 of SEQ ID NO: 14 is isoleucine; and the amino acid in the capsid protein corresponding to amino acid position 505 of SEQ ID NO: 14 is arginine, and wherein the capsid protein comprises an amino acid sequence that is at least 70%, at least 75%, at least 80%, at least 85%, at least 86%, at least 87%, at least 88%, at least 89%, at least 90%, at least 91%, at least 92%, at least 93%, at least 94%, at least 95%, at least 96%, at least 97%, at least 98%, or at least 99% identical to any one of the amino acid sequences of SEQ ID NOs: 31-411 and 453-1304.

[0123] In certain embodiments, the instant disclosure provides a recombinant adeno-associated virus (AAV) capsid protein, wherein: the amino acid in the capsid protein corresponding to amino acid position 501 of SEQ ID NO: 14 is isoleucine; and the amino acid in the capsid protein corresponding to amino acid position 706 of SEQ ID NO: 14 is cysteine; wherein the capsid protein does not comprise the amino acid sequence of amino acids 203-736 of SEQ ID NOs: 11-15; and wherein the recombinant AAV capsid protein comprises an amino acid sequence that is at least 70%, at least 75%, at least 80%, at least 85%, at least 86%, at least 87%, at least 88%, at least 89%, at least 90%, at least 91%, at least 92%, at least 93%, at least 94%, at least 95%, at least 96%, at least 97%, at least 98%, or at least 99% identical to the amino acid sequence of SEQ ID NOs: 1-30. In certain embodiments, the instant disclosure provides a recombinant adeno-associated virus (AAV) capsid protein, wherein: the amino acid in the capsid protein corresponding to amino acid position 501 of SEQ ID NO: 14 is isoleucine; and the amino acid in the capsid protein corresponding to amino acid position 706 of SEQ ID NO: 14 is cysteine, and wherein the capsid protein comprises an amino acid sequence that is at least 70%, at least 75%, at least 80%, at least 85%, at least 86%, at least 87%, at least 88%, at least 89%, at least 90%, at least 91%, at least 92%, at least 93%, at least 94%, at least 95%, at least 96%, at least 97%, at least 98%, or at least 99% identical to any one of the amino acid sequences of SEQ ID NOs: 31-411 and 453-1304.

[0124] In certain embodiments, the instant disclosure provides a recombinant adeno-associated virus (AAV) capsid protein, wherein: the amino acid in the capsid protein corresponding to amino acid position 505 of SEQ ID NO: 14 is arginine; and the amino acid in the capsid protein corresponding to amino acid position 706 of SEQ ID NO: 14 is cysteine; wherein the capsid protein does not comprise the amino acid sequence of amino acids 203-736 of SEQ ID NOs: 11-15; and wherein the recombinant AAV capsid protein comprises an amino acid sequence that is at least 70%, at least 75%, at least 80%, at least 85%, at least 86%, at least 87%, at least 88%, at least 89%, at least 90%, at least 91%, at least 92%, at least 93%, at least 94%, at least 95%, at least 96%, at least 97%, at least 98%, or at least 99% identical to the amino acid sequence of SEQ ID NOs: 1-30. In certain embodiments, the instant disclosure provides a recombinant adeno-associated virus (AAV) capsid protein, wherein: the amino acid in the capsid protein corresponding to amino acid position 505 of SEQ ID NO: 14 is arginine; and the amino acid in the capsid protein corresponding to amino acid position 706 of SEQ ID NO: 14 is cysteine, and wherein the capsid protein comprises an amino acid sequence that is at least 70%, at least 75%, at least 80%, at least 85%, at least 86%, at least 87%, at least 88%, at least 89%, at least 90%, at least 91%, at least 92%, at least 93%, at least 94%, at least 95%, at least 96%, at least 97%, at least 98%, or at least 99% identical to any one of the amino acid sequences of SEQ ID NOs: 31-411 and 453-1304.

[0125] In certain embodiments, the instant disclosure provides a recombinant adeno-associated virus (AAV) capsid protein, wherein: the amino acid in the capsid protein corresponding to amino acid position 346 of SEQ ID NO: 14 is alanine or glycine; the amino acid in the capsid protein corresponding to amino acid position 705 of SEQ ID NO: 14 is leucine; and the amino acid in the capsid protein corresponding to amino acid position 501 of SEQ ID NO: 14 is isoleucine, and wherein the capsid protein does not comprise the amino acid sequence of amino acids 203-736 of SEQ ID NOs: 11-15; and wherein the recombinant AAV capsid protein comprises an amino acid sequence that is at least 70%, at least 75%, at least 80%, at least 85%, at least 86%, at least 87%, at least 88%, at least 89%, at least 90%, at least 91%, at least 92%, at least 93%, at least 94%, at least 95%, at least 96%, at least 97%, at least 98%, or at least 99% identical to the amino acid sequence of SEQ ID NOs: 1-30. In certain embodiments, the instant disclosure provides a recombinant adeno-associated virus (AAV) capsid protein, wherein: the amino acid in the capsid protein corresponding to amino acid position 346 of SEQ ID NO: 14 is alanine or glycine; the amino acid in the capsid protein corresponding to amino acid position 705 of SEQ ID NO: 14 is leucine; and the amino acid in the capsid protein corresponding to amino acid position 501 of SEQ ID NO: 14 is isoleucine, and wherein the recombinant AAV capsid protein comprises an amino acid sequence that is at least 70%, at least 75%, at least 80%, at least 85%, at least 86%, at least 87%, at least 88%, at least 89%, at least 90%, at least 91%, at least 92%, at least 93%, at least 94%, at least 95%, at least 96%, at least 97%, at least 98%, or at least 99% identical to the amino acid sequence of SEQ ID NOs: 31-411 and 453-1304.

[0126] In certain embodiments, the instant disclosure provides a recombinant adeno-associated virus (AAV) capsid protein, wherein: the amino acid in the capsid protein corresponding to amino acid position 346 of SEQ ID NO: 14 is alanine or glycine; the amino acid in the capsid protein corresponding to amino acid position 705 of SEQ ID NO: 14 is leucine; and the amino acid in the capsid protein corresponding to amino acid position 505 of SEQ ID NO: 14 is arginine, and wherein the capsid protein does not comprise the amino acid sequence of amino acids 203-736 of SEQ ID NOs: 11-15; and wherein the recombinant AAV capsid protein comprises an amino acid sequence that is at least 70%, at least 75%, at least 80%, at least 85%, at least 86%, at least 87%, at least 88%, at least 89%, at least 90%, at least 91%, at least 92%, at least 93%, at least 94%, at least 95%, at least 96%, at least 97%, at least 98%, or at least 99% identical to the amino acid sequence of SEQ ID NOs: 1-30. In certain embodiments, the instant disclosure provides a recombinant adeno-associated virus (AAV) capsid protein, wherein: the amino acid in the capsid protein corresponding to amino acid position 346 of SEQ ID NO: 14 is alanine or glycine; the amino acid in the capsid protein corresponding to amino acid position 705 of SEQ ID NO: 14 is leucine; and the amino acid in the capsid protein corresponding to amino acid position 505 of SEQ ID NO: 14 is arginine, and wherein the recombinant AAV capsid protein comprises an amino acid sequence that is at least 70%, at least 75%, at least 80%, at least 85%, at least 86%, at least 87%, at least 88%, at least 89%, at least 90%, at least 91%, at least 92%, at least 93%, at least 94%, at least 95%, at least 96%, at least 97%, at least 98%, or at least 99% identical to the amino acid sequence of SEQ ID NOs: 31-411 and 453-1304.

[0127] In certain embodiments, the instant disclosure provides a recombinant adeno-associated virus (AAV) capsid protein, wherein: the amino acid in the capsid protein corresponding to amino acid position 346 of SEQ ID NO: 14 is alanine or glycine; the amino acid in the capsid protein corresponding to amino acid position 705 of SEQ ID NO: 14 is leucine; and the amino acid in the capsid protein corresponding to amino acid position 706 of SEQ ID NO: 14 is cysteine, and wherein the capsid protein does not comprise the amino acid sequence of amino acids 203-736 of SEQ ID NOs: 11-15; and wherein the recombinant AAV capsid protein comprises an amino acid sequence that is at least 70%, at least 75%, at least 80%, at least 85%, at least 86%, at least 87%, at least 88%, at least 89%, at least 90%, at least 91%, at least 92%, at least 93%, at least 94%, at least 95%, at least 96%, at least 97%, at least 98%, or at least 99% identical to the amino acid sequence of SEQ ID NOs: 1-30. In certain embodiments, the instant disclosure provides a recombinant adeno-associated virus (AAV) capsid protein, wherein: the amino acid in the capsid protein corresponding to amino acid position 346 of SEQ ID NO: 14 is alanine or glycine; the amino acid in the capsid protein corresponding to amino acid position 705 of SEQ ID NO: 14 is leucine; and the amino acid in the capsid protein corresponding to amino acid position 706 of SEQ ID NO: 14 is cysteine, and wherein the recombinant AAV capsid protein comprises an amino acid sequence that is at least 70%, at least 75%, at least 80%, at least 85%, at least 86%, at least 87%, at least 88%, at least 89%, at least 90%, at least 91%, at least 92%, at least 93%, at least 94%, at least 95%, at least 96%, at least 97%, at least 98%, or at least 99% identical to the amino acid sequence of SEQ ID NOs: 31-411 and 453-1304.

[0128] In certain embodiments, the instant disclosure provides a recombinant adeno-associated virus (AAV) capsid protein, wherein: the amino acid in the capsid protein corresponding to amino acid position 501 of SEQ ID NO: 14 is isoleucine; the amino acid in the capsid protein corresponding to amino acid position 705 of SEQ ID NO: 14 is leucine; and the amino acid in the capsid protein corresponding to amino acid position 505 of SEQ ID NO: 14 is arginine, and wherein the capsid protein does not comprise the amino acid sequence of amino acids 203-736 of SEQ ID NOs: 11-15; and wherein the recombinant AAV capsid protein comprises an amino acid sequence that is at least 70%, at least 75%, at least 80%, at least 85%, at least 86%, at least 87%, at least 88%, at least 89%, at least 90%, at least 91%, at least 92%, at least 93%, at least 94%, at least 95%, at least 96%, at least 97%, at least 98%, or at least 99% identical to the amino acid sequence of SEQ ID NOs: 1-30. In certain embodiments, the instant disclosure provides a recombinant adeno-associated virus (AAV) capsid protein, wherein: the amino acid in the capsid protein corresponding to amino acid position 501 of SEQ ID NO: 14 is isoleucine; the amino acid in the capsid protein corresponding to amino acid position 705 of SEQ ID NO: 14 is leucine; and the amino acid in the capsid protein corresponding to amino acid position 505 of SEQ ID NO: 14 is arginine, and wherein the recombinant AAV capsid protein comprises an amino acid sequence that is at least 70%, at least 75%, at least 80%, at least 85%, at least 86%, at least 87%, at least 88%, at least 89%, at least 90%, at least 91%, at least 92%, at least 93%, at least 94%, at least 95%, at least 96%, at least 97%, at least 98%, or at least 99% identical to the amino acid sequence of SEQ ID NOs: 31-411 and 453-1304.

[0129] In certain embodiments, the instant disclosure provides a recombinant adeno-associated virus (AAV) capsid protein, wherein: the amino acid in the capsid protein corresponding to amino acid position 501 of SEQ ID NO: 14 is isoleucine; the amino acid in the capsid protein corresponding to amino acid position 705 of SEQ ID NO: 14 is leucine; and the amino acid in the capsid protein corresponding to amino acid position 706 of SEQ ID NO: 14 is cysteine, and wherein the capsid protein does not comprise the amino acid sequence of amino acids 203-736 of SEQ ID NOs: 11-15; and wherein the recombinant AAV capsid protein comprises an amino acid sequence that is at least 70%, at least 75%, at least 80%, at least 85%, at least 86%, at least 87%, at least 88%, at least 89%, at least 90%, at least 91%, at least 92%, at least 93%, at least 94%, at least 95%, at least 96%, at least 97%, at least 98%, or at least 99% identical to the amino acid sequence of SEQ ID NOs: 1-30. In certain embodiments, the instant disclosure provides a recombinant adeno-associated virus (AAV) capsid protein, wherein: the amino acid in the capsid protein corresponding to amino acid position 501 of SEQ ID NO: 14 is isoleucine; the amino acid in the capsid protein corresponding to amino acid position 705 of SEQ ID NO: 14 is leucine; and the amino acid in the capsid protein corresponding to amino acid position 706 of SEQ ID NO: 14 is cysteine, and wherein the recombinant AAV capsid protein comprises an amino acid sequence that is at least 70%, at least 75%, at least 80%, at least 85%, at least 86%, at least 87%, at least 88%, at least 89%, at least 90%, at least 91%, at least 92%, at least 93%, at least 94%, at least 95%, at least 96%, at least 97%, at least 98%, or at least 99% identical to the amino acid sequence of SEQ ID NOs: 31-411 and 453-1304.

[0130] In certain embodiments, the instant disclosure provides a recombinant adeno-associated virus (AAV) capsid protein, wherein: the amino acid in the capsid protein corresponding to amino acid position 505 of SEQ ID NO: 14 is arginine; the amino acid in the capsid protein corresponding to amino acid position 705 of SEQ ID NO: 14 is leucine; and the amino acid in the capsid protein corresponding to amino acid position 706 of SEQ ID NO: 14 is cysteine, and wherein the capsid protein does not comprise the amino acid sequence of amino acids 203-736 of SEQ ID NOs: 11-15; and wherein the recombinant AAV capsid protein comprises an amino acid sequence that is at least 70%, at least 75%, at least 80%, at least 85%, at least 86%, at least 87%, at least 88%, at least 89%, at least 90%, at least 91%, at least 92%, at least 93%, at least 94%, at least 95%, at least 96%, at least 97%, at least 98%, or at least 99% identical to the amino acid sequence of SEQ ID NOs: 1-30. In certain embodiments, the instant disclosure provides a recombinant adeno-associated virus (AAV) capsid protein, wherein: the amino acid in the capsid protein corresponding to amino acid position 505 of SEQ ID NO: 14 is arginine; the amino acid in the capsid protein corresponding to amino acid position 705 of SEQ ID NO: 14 is leucine; and the amino acid in the capsid protein corresponding to amino acid position 706 of SEQ ID NO: 14 is cysteine, and wherein the recombinant AAV capsid protein comprises an amino acid sequence that is at least 70%, at least 75%, at least 80%, at least 85%, at least 86%, at least 87%, at least 88%, at least 89%, at least 90%, at least 91%, at least 92%, at least 93%, at least 94%, at least 95%, at least 96%, at least 97%, at least 98%, or at least 99% identical to the amino acid sequence of SEQ ID NOs: 31-411 and 453-1304.

[0131] In certain embodiments, the instant disclosure provides a recombinant adeno-associated virus (AAV) capsid protein, wherein: the amino acid in the capsid protein corresponding to amino acid position 346 of SEQ ID NO: 14 is alanine; the amino acid in the capsid protein corresponding to amino acid position 501 of SEQ ID NO: 14 is isoleucine; and the amino acid in the capsid protein corresponding to amino acid position 505 of SEQ ID NO: 14 is arginine, and wherein the capsid protein does not comprise the amino acid sequence of amino acids 203-736 of SEQ ID NOs: 11-15; and wherein the recombinant AAV capsid protein comprises an amino acid sequence that is at least 70%, at least 75%, at least 80%, at least 85%, at least 86%, at least 87%, at least 88%, at least 89%, at least 90%, at least 91%, at least 92%, at least 93%, at least 94%, at least 95%, at least 96%, at least 97%, at least 98%, or at least 99% identical to the amino acid sequence of SEQ ID NOs: 1-30. In certain embodiments, the instant disclosure provides a recombinant adeno-associated virus (AAV) capsid protein, wherein: the amino acid in the capsid protein corresponding to amino acid position 346 of SEQ ID NO: 14 is alanine; the amino acid in the capsid protein corresponding to amino acid position 501 of SEQ ID NO: 14 is isoleucine; and the amino acid in the capsid protein corresponding to amino acid position 505 of SEQ ID NO: 14 is arginine, and wherein the capsid protein comprises an amino acid sequence that is at least 70%, at least 75%, at least 80%, at least 85%, at least 86%, at least 87%, at least 88%, at least 89%, at least 90%, at least 91%, at least 92%, at least 93%, at least 94%, at least 95%, at least 96%, at least 97%, at least 98%, or at least 99% identical to any one of the amino acid sequences of SEQ ID NOs: 31-411 and 453-1304.

[0132] In certain embodiments, the instant disclosure provides a recombinant adeno-associated virus (AAV) capsid protein, wherein: the amino acid in the capsid protein corresponding to amino acid position 346 of SEQ ID NO: 14 is alanine; the amino acid in the capsid protein corresponding to amino acid position 501 of SEQ ID NO: 14 is isoleucine; and the amino acid in the capsid protein corresponding to amino acid position 706 of SEQ ID NO: 14 is cysteine, and wherein the capsid protein does not comprise the amino acid sequence of amino acids 203-736 of SEQ ID NOs: 11-15; and wherein the recombinant AAV capsid protein comprises an amino acid sequence that is at least 70%, at least 75%, at least 80%, at least 85%, at least 86%, at least 87%, at least 88%, at least 89%, at least 90%, at least 91%, at least 92%, at least 93%, at least 94%, at least 95%, at least 96%, at least 97%, at least 98%, or at least 99% identical to the amino acid sequence of SEQ ID NOs: 1-30. In certain embodiments, the instant disclosure provides a recombinant adeno-associated virus (AAV) capsid protein, wherein: the amino acid in the capsid protein corresponding to amino acid position 346 of SEQ ID NO: 14 is alanine; the amino acid in the capsid protein corresponding to amino acid position 501 of SEQ ID NO: 14 is isoleucine; and the amino acid in the capsid protein corresponding to amino acid position 706 of SEQ ID NO: 14 is cysteine, and wherein the capsid protein comprises an amino acid sequence that is at least 70%, at least 75%, at least 80%, at least 85%, at least 86%, at least 87%, at least 88%, at least 89%, at least 90%, at least 91%, at least 92%, at least 93%, at least 94%, at least 95%, at least 96%, at least 97%, at least 98%, or at least 99% identical to any one of the amino acid sequences of SEQ ID NOs: 31-411 and 453-1304.

[0133] In certain embodiments, the instant disclosure provides a recombinant adeno-associated virus (AAV) capsid protein, wherein: the amino acid in the capsid protein corresponding to amino acid position 501 of SEQ ID NO: 14 is isoleucine; the amino acid in the capsid protein corresponding to amino acid position 505 of SEQ ID NO: 14 is arginine; and the amino acid in the capsid protein corresponding to amino acid position 706 of SEQ ID NO: 14 is cysteine, and wherein the capsid protein does not comprise the amino acid sequence of amino acids 203-736 of SEQ ID NOs: 11-15; and wherein the recombinant AAV capsid protein comprises an amino acid sequence that is at least 70%, at least 75%, at least 80%, at least 85%, at least 86%, at least 87%, at least 88%, at least 89%, at least 90%, at least 91%, at least 92%, at least 93%, at least 94%, at least 95%, at least 96%, at least 97%, at least 98%, or at least 99% identical to the amino acid sequence of SEQ ID NOs: 1-30. In certain embodiments, the instant disclosure provides a recombinant adeno-associated virus (AAV) capsid protein, wherein: the amino acid in the capsid protein corresponding to amino acid position 501 of SEQ ID NO: 14 is isoleucine; the amino acid in the capsid protein corresponding to amino acid position 505 of SEQ ID NO: 14 is arginine; and the amino acid in the capsid protein corresponding to amino acid position 706 of SEQ ID NO: 14 is cysteine, and wherein the capsid protein comprises an amino acid sequence that is at least 70%, at least 75%, at least 80%, at least 85%, at least 86%, at least 87%, at least 88%, at least 89%, at least 90%, at least 91%, at least 92%, at least 93%, at least 94%, at least 95%, at least 96%, at least 97%, at least 98%, or at least 99% identical to any one of the amino acid sequences of SEQ ID NOs: 31-411 and 453-1304.

[0134] In certain embodiments, the instant disclosure provides a recombinant adeno-associated virus (AAV) capsid protein, wherein: the amino acid in the capsid protein corresponding to amino acid position 346 of SEQ ID NO: 14 is alanine; the amino acid in the capsid protein corresponding to amino acid position 505 of SEQ ID NO: 14 is arginine; and the amino acid in the capsid protein corresponding to amino acid position 706 of SEQ ID NO: 14 is cysteine, and wherein the capsid protein does not comprise the amino acid sequence of amino acids 203-736 of SEQ ID NOs: 11-15; and wherein the recombinant AAV capsid protein comprises an amino acid sequence that is at least 70%, at least 75%, at least 80%, at least 85%, at least 86%, at least 87%, at least 88%, at least 89%, at least 90%, at least 91%, at least 92%, at least 93%, at least 94%, at least 95%, at least 96%, at least 97%, at least 98%, or at least 99% identical to the amino acid sequence of SEQ ID NOs: 1-30. In certain embodiments, the instant disclosure provides a recombinant adeno-associated virus (AAV) capsid protein, wherein: the amino acid in the capsid protein corresponding to amino acid position 346 of SEQ ID NO: 14 is alanine; the amino acid in the capsid protein corresponding to amino acid position 505 of SEQ ID NO: 14 is arginine; and the amino acid in the capsid protein corresponding to amino acid position 706 of SEQ ID NO: 14 is cysteine, and wherein the capsid protein comprises an amino acid sequence that is at least 70%, at least 75%, at least 80%, at least 85%, at least 86%, at least 87%, at least 88%, at least 89%, at least 90%, at least 91%, at least 92%, at least 93%, at least 94%, at least 95%, at least 96%, at least 97%, at least 98%, or at least 99% identical to any one of the amino acid sequences of SEQ ID NOs: 31-411 and 453-1304.

[0135] In certain embodiments, the instant disclosure provides a recombinant adeno-associated virus (AAV) capsid protein, wherein: the amino acid in the capsid protein corresponding to amino acid position 346 of SEQ ID NO: 14 is alanine or glycine; the amino acid in the capsid protein corresponding to amino acid position 501 of SEQ ID NO: 14 is isoleucine; the amino acid in the capsid protein corresponding to amino acid position 705 of SEQ ID NO: 14 is leucine; and the amino acid in the capsid protein corresponding to amino acid position 505 of SEQ ID NO: 14 is arginine, and wherein the capsid protein does not comprise the amino acid sequence of amino acids 203-736 of SEQ ID NOs: 11-15; and wherein the recombinant AAV capsid protein comprises an amino acid sequence that is at least 70%, at least 75%, at least 80%, at least 85%, at least 86%, at least 87%, at least 88%, at least 89%, at least 90%, at least 91%, at least 92%, at least 93%, at least 94%, at least 95%, at least 96%, at least 97%, at least 98%, or at least 99% identical to the amino acid sequence of SEQ ID NOs: 1-30. In certain embodiments, the instant disclosure provides a recombinant adeno-associated virus (AAV) capsid protein, wherein: the amino acid in the capsid protein corresponding to amino acid position 346 of SEQ ID NO: 14 is alanine or glycine; the amino acid in the capsid protein corresponding to amino acid position 501 of SEQ ID NO: 14 is isoleucine; the amino acid in the capsid protein corresponding to amino acid position 705 of SEQ ID NO: 14 is leucine; and the amino acid in the capsid protein corresponding to amino acid position 505 of SEQ ID NO: 14 is arginine, and wherein the capsid protein comprises an amino acid sequence that is at least 70%, at least 75%, at least 80%, at least 85%, at least 86%, at least 87%, at least 88%, at least 89%, at least 90%, at least 91%, at least 92%, at least 93%, at least 94%, at least 95%, at least 96%, at least 97%, at least 98%, or at least 99% identical to any one of the amino acid sequences of SEQ ID NOs: 31-411 and 453-1304.

[0136] In certain embodiments, the instant disclosure provides a recombinant adeno-associated virus (AAV) capsid protein, wherein: the amino acid in the capsid protein corresponding to amino acid position 346 of SEQ ID NO: 14 is alanine or glycine; the amino acid in the capsid protein corresponding to amino acid position 501 of SEQ ID NO: 14 is isoleucine; the amino acid in the capsid protein corresponding to amino acid position 705 of SEQ ID NO: 14 is leucine; and the amino acid in the capsid protein corresponding to amino acid position 706 of SEQ ID NO: 14 is cysteine, and wherein the capsid protein does not comprise the amino acid sequence of amino acids 203-736 of SEQ ID NOs: 11-15; and wherein the recombinant AAV capsid protein comprises an amino acid sequence that is at least 70%, at least 75%, at least 80%, at least 85%, at least 86%, at least 87%, at least 88%, at least 89%, at least 90%, at least 91%, at least 92%, at least 93%, at least 94%, at least 95%, at least 96%, at least 97%, at least 98%, or at least 99% identical to the amino acid sequence of SEQ ID NOs: 1-30. In certain embodiments, the instant disclosure provides a recombinant adeno-associated virus (AAV) capsid protein, wherein: the amino acid in the capsid protein corresponding to amino acid position 346 of SEQ ID NO: 14 is alanine or glycine; the amino acid in the capsid protein corresponding to amino acid position 501 of SEQ ID NO: 14 is isoleucine; the amino acid in the capsid protein corresponding to amino acid position 705 of SEQ ID NO: 14 is leucine; and the amino acid in the capsid protein corresponding to amino acid position 706 of SEQ ID NO: 14 is cysteine, and wherein the capsid protein comprises an amino acid sequence that is at least 70%, at least 75%, at least 80%, at least 85%, at least 86%, at least 87%, at least 88%, at least 89%, at least 90%, at least 91%, at least 92%, at least 93%, at least 94%, at least 95%, at least 96%, at least 97%, at least 98%, or at least 99% identical to any one of the amino acid sequences of SEQ ID NOs: 31-411 and 453-1304.

[0137] In certain embodiments, the instant disclosure provides a recombinant adeno-associated virus (AAV) capsid protein, wherein: the amino acid in the capsid protein corresponding to amino acid position 501 of SEQ ID NO: 14 is isoleucine; the amino acid in the capsid protein corresponding to amino acid position 505 of SEQ ID NO: 14 is arginine; the amino acid in the capsid protein corresponding to amino acid position 705 of SEQ ID NO: 14 is leucine; and the amino acid in the capsid protein corresponding to amino acid position 706 of SEQ ID NO: 14 is cysteine, and wherein the capsid protein does not comprise the amino acid sequence of amino acids 203-736 of SEQ ID NOs: 11-15; and wherein the recombinant AAV capsid protein comprises an amino acid sequence that is at least 70%, at least 75%, at least 80%, at least 85%, at least 86%, at least 87%, at least 88%, at least 89%, at least 90%, at least 91%, at least 92%, at least 93%, at least 94%, at least 95%, at least 96%, at least 97%, at least 98%, or at least 99% identical to the amino acid sequence of SEQ ID NOs: 1-30. In certain embodiments, the instant disclosure provides a recombinant adeno-associated virus (AAV) capsid protein, wherein: the amino acid in the capsid protein corresponding to amino acid position 501 of SEQ ID NO: 14 is isoleucine; the amino acid in the capsid protein corresponding to amino acid position 505 of SEQ ID NO: 14 is arginine; the amino acid in the capsid protein corresponding to amino acid position 705 of SEQ ID NO: 14 is leucine; and the amino acid in the capsid protein corresponding to amino acid position 706 of SEQ ID NO: 14 is cysteine, and wherein the capsid protein comprises an amino acid sequence that is at least 70%, at least 75%, at least 80%, at least 85%, at least 86%, at least 87%, at least 88%, at least 89%, at least 90%, at least 91%, at least 92%, at least 93%, at least 94%, at least 95%, at least 96%, at least 97%, at least 98%, or at least 99% identical to any one of the amino acid sequences of SEQ ID NOs: 31-411 and 453-1304.

[0138] In certain embodiments, the instant disclosure provides a recombinant adeno-associated virus (AAV) capsid protein, wherein: the amino acid in the capsid protein corresponding to amino acid position 346 of SEQ ID NO: 14 is alanine or glycine; the amino acid in the capsid protein corresponding to amino acid position 505 of SEQ ID NO: 14 is arginine; the amino acid in the capsid protein corresponding to amino acid position 705 of SEQ ID NO: 14 is leucine; and the amino acid in the capsid protein corresponding to amino acid position 706 of SEQ ID NO: 14 is cysteine, and wherein the capsid protein does not comprise the amino acid sequence of amino acids 203-736 of SEQ ID NOs: 11-15; and wherein the recombinant AAV capsid protein comprises an amino acid sequence that is at least 70%, at least 75%, at least 80%, at least 85%, at least 86%, at least 87%, at least 88%, at least 89%, at least 90%, at least 91%, at least 92%, at least 93%, at least 94%, at least 95%, at least 96%, at least 97%, at least 98%, or at least 99% identical to the amino acid sequence of SEQ ID NOs: 1-30. In certain embodiments, the instant disclosure provides a recombinant adeno-associated virus (AAV) capsid protein, wherein: the amino acid in the capsid protein corresponding to amino acid position 346 of SEQ ID NO: 14 is alanine or glycine; the amino acid in the capsid protein corresponding to amino acid position 505 of SEQ ID NO: 14 is arginine; the amino acid in the capsid protein corresponding to amino acid position 705 of SEQ ID NO: 14 is leucine; and the amino acid in the capsid protein corresponding to amino acid position 706 of SEQ ID NO: 14 is cysteine, and wherein the capsid protein comprises an amino acid sequence that is at least 70%, at least 75%, at least 80%, at least 85%, at least 86%, at least 87%, at least 88%, at least 89%, at least 90%, at least 91%, at least 92%, at least 93%, at least 94%, at least 95%, at least 96%, at least 97%, at least 98%, or at least 99% identical to any one of the amino acid sequences of SEQ ID NOs: 31-411 and 453-1304.

[0139] In certain embodiments, the instant disclosure provides a recombinant adeno-associated virus (AAV) capsid protein, wherein: the amino acid in the capsid protein corresponding to amino acid position 346 of SEQ ID NO: 14 is alanine; the amino acid in the capsid protein corresponding to amino acid position 501 of SEQ ID NO: 14 is isoleucine; the amino acid in the capsid protein corresponding to amino acid position 505 of SEQ ID NO: 14 is arginine; and the amino acid in the capsid protein corresponding to amino acid position 706 of SEQ ID NO: 14 is cysteine; wherein the capsid protein does not comprise the amino acid sequence of amino acids 203-736 of SEQ ID NOs: 11-15; and wherein the recombinant AAV capsid protein comprises an amino acid sequence that is at least 70%, at least 75%, at least 80%, at least 85%, at least 86%, at least 87%, at least 88%, at least 89%, at least 90%, at least 91%, at least 92%, at least 93%, at least 94%, at least 95%, at least 96%, at least 97%, at least 98%, or at least 99% identical to the amino acid sequence of SEQ ID NOs: 1-30. In certain embodiments, the instant disclosure provides a recombinant adeno-associated virus (AAV) capsid protein, wherein: the amino acid in the capsid protein corresponding to amino acid position 346 of SEQ ID NO: 14 is alanine; the amino acid in the capsid protein corresponding to amino acid position 501 of SEQ ID NO: 14 is isoleucine; the amino acid in the capsid protein corresponding to amino acid position 505 of SEQ ID NO: 14 is arginine; and the amino acid in the capsid protein corresponding to amino acid position 706 of SEQ ID NO: 14 is cysteine, and wherein the capsid protein comprises an amino acid sequence that is at least 70%, at least 75%, at least 80%, at least 85%, at least 86%, at least 87%, at least 88%, at least 89%, at least 90%, at least 91%, at least 92%, at least 93%, at least 94%, at least 95%, at least 96%, at least 97%, at least 98%, or at least 99% identical to any one of the amino acid sequences of SEQ ID NOs: 31-411 and 453-1304.

[0140] In certain embodiments, the instant disclosure provides a recombinant adeno-associated virus (AAV) capsid protein, wherein: the amino acid in the capsid protein corresponding to amino acid position 346 of SEQ ID NO: 14 is alanine or glycine; the amino acid in the capsid protein corresponding to amino acid position 501 of SEQ ID NO: 14 is isoleucine; the amino acid in the capsid protein corresponding to amino acid position 505 of SEQ ID NO: 14 is arginine; the amino acid in the capsid protein corresponding to amino acid position 705 of SEQ ID NO: 14 is leucine; and the amino acid in the capsid protein corresponding to amino acid position 706 of SEQ ID NO: 14 is cysteine, and wherein the capsid protein does not comprise the amino acid sequence of amino acids 203-736 of SEQ ID NOs: 11-15; and wherein the recombinant AAV capsid protein comprises an amino acid sequence that is at least 70%, at least 75%, at least 80%, at least 85%, at least 86%, at least 87%, at least 88%, at least 89%, at least 90%, at least 91%, at least 92%, at least 93%, at least 94%, at least 95%, at least 96%, at least 97%, at least 98%, or at least 99% identical to the amino acid sequence of SEQ ID NOs: 1-30. In certain embodiments, the instant disclosure provides a recombinant adeno-associated virus (AAV) capsid protein, wherein: the amino acid in the capsid protein corresponding to amino acid position 346 of SEQ ID NO: 14 is alanine or glycine; the amino acid in the capsid protein corresponding to amino acid position 501 of SEQ ID NO: 14 is isoleucine; the amino acid in the capsid protein corresponding to amino acid position 505 of SEQ ID NO: 14 is arginine; the amino acid in the capsid protein corresponding to amino acid position 705 of SEQ ID NO: 14 is leucine; and the amino acid in the capsid protein corresponding to amino acid position 706 of SEQ ID NO: 14 is cysteine, and wherein the capsid protein comprises an amino acid sequence that is at least 70%, at least 75%, at least 80%, at least 85%, at least 86%, at least 87%, at least 88%, at least 89%, at least 90%, at least 91%, at least 92%, at least 93%, at least 94%, at least 95%, at least 96%, at least 97%, at least 98%, or at least 99% identical to any one of the amino acid sequences of SEQ ID NOs: 31-411 and 453-1304.

[0141] In certain embodiments, the instant disclosure provides a recombinant adeno-associated virus (AAV) capsid protein comprising any one of the amino acid sequences of SEQ ID NOs: 31-411 and 453-1304.

[0142] In certain embodiments, the instant disclosure provides a recombinant adeno-associated virus (AAV) capsid protein comprising an amino acid sequence that is at least 70%, at least 75%, at least 80%, at least 85%, at least 86%, at least 87%, at least 88%, at least 89%, at least 90%, at least 91%, at least 92%, at least 93%, at least 94%, at least 95%, at least 96%, at least 97%, at least 98%, or at least 99% identical to amino acids 203-736 of any one of SEQ ID NOs: 31-197, 220-234, 250-264, 280-306, and 397-411, wherein: the amino acid in the capsid protein corresponding to amino acid positions 346, 501, 505, and/or 706 of SEQ ID NO: 14 is not the wild type amino acid. In certain embodiments, the instant disclosure provides a recombinant adeno-associated virus (AAV) capsid protein comprising an amino acid sequence that is at least 70%, at least 75%, at least 80%, at least 85%, at least 86%, at least 87%, at least 88%, at least 89%, at least 90%, at least 91%, at least 92%, at least 93%, at least 94%, at least 95%, at least 96%, at least 97%, at least 98%, or at least 99% identical to amino acids 138-736 of any one of SEQ ID NOs: 31-197, 220-234, 250-264, 280-306, and 397-411, wherein: the amino acid in the capsid protein corresponding to amino acid positions 346, 501, 505, and/or 706 of SEQ ID NO: 14 is not the wild type amino acid. In certain embodiments, the instant disclosure provides a recombinant adeno-associated virus (AAV) capsid protein comprising an amino acid sequence that is at least 70%, at least 75%, at least 80%, at least 85%, at least 86%, at least 87%, at least 88%, at least 89%, at least 90%, at least 91%, at least 92%, at least 93%, at least 94%, at least 95%, at least 96%, at least 97%, at least 98%, or at least 99% identical to amino acids 1-736 of any one of SEQ ID NOs: 31-197, 220-234, 250-264, 280-306, and 397-411, wherein: the amino acid in the capsid protein corresponding to amino acid positions 346, 501, 505, and/or 706 of SEQ ID NO: 14 is not the wild type amino acid.

[0143] In certain embodiments, the instant disclosure provides a recombinant adeno-associated virus (AAV) capsid protein comprising an amino acid sequence that is at least 70%, at least 75%, at least 80%, at least 85%, at least 86%, at least 87%, at least 88%, at least 89%, at least 90%, at least 91%, at least 92%, at least 93%, at least 94%, at least 95%, at least 96%, at least 97%, at least 98%, or at least 99% identical to amino acids 203-736 of any one of SEQ ID NOs: 31-197, 220-234, 250-264, 280-306, and 397-411, wherein: the amino acid in the capsid protein corresponding to amino acid position 346 of SEQ ID NO: 14 is alanine; the amino acid in the capsid protein corresponding to amino acid position 501 of SEQ ID NO: 14 is isoleucine; the amino acid in the capsid protein corresponding to amino acid position 505 of SEQ ID NO: 14 is arginine; and/or the amino acid in the capsid protein corresponding to amino acid position 706 of SEQ ID NO: 14 is cysteine. In certain embodiments, the instant disclosure provides a recombinant adeno-associated virus (AAV) capsid protein comprising an amino acid sequence that is at least 70%, at least 75%, at least 80%, at least 85%, at least 86%, at least 87%, at least 88%, at least 89%, at least 90%, at least 91%, at least 92%, at least 93%, at least 94%, at least 95%, at least 96%, at least 97%, at least 98%, or at least 99% identical to amino acids 138-736 of any one of SEQ ID NOs: 31-197, 220-234, 250-264, 280-306, and 397-411, wherein: the amino acid in the capsid protein corresponding to amino acid position 346 of SEQ ID NO: 14 is alanine; the amino acid in the capsid protein corresponding to amino acid position 501 of SEQ ID NO: 14 is isoleucine; the amino acid in the capsid protein corresponding to amino acid position 505 of SEQ ID NO: 14 is arginine; and/or the amino acid in the capsid protein corresponding to amino acid position 706 of SEQ ID NO: 14 is cysteine. In certain embodiments, the instant disclosure provides a recombinant adeno-associated virus (AAV) capsid protein comprising an amino acid sequence that is at least 70%, at least 75%, at least 80%, at least 85%, at least 86%, at least 87%, at least 88%, at least 89%, at least 90%, at least 91%, at least 92%, at least 93%, at least 94%, at least 95%, at least 96%, at least 97%, at least 98%, or at least 99% identical to amino acids 1-736 of any one of SEQ ID NOs: 31-197, 220-234, 250-264, 280-306, and 397-411, wherein: the amino acid in the capsid protein corresponding to amino acid position 346 of SEQ ID NO: 14 is alanine; the amino acid in the capsid protein corresponding to amino acid position 501 of SEQ ID NO: 14 is isoleucine; the amino acid in the capsid protein corresponding to amino acid position 505 of SEQ ID NO: 14 is arginine; and/or the amino acid in the capsid protein corresponding to amino acid position 706 of SEQ ID NO: 14 is cysteine.

[0144] In certain embodiments, the instant disclosure provides a recombinant adeno-associated virus (AAV) capsid protein comprising an amino acid sequence that is at least 70%, at least 75%, at least 80%, at least 85%, at least 86%, at least 87%, at least 88%, at least 89%, at least 90%, at least 91%, at least 92%, at least 93%, at least 94%, at least 95%, at least 96%, at least 97%, at least 98%, or at least 99% identical to amino acids 197-736 of any one of SEQ ID NOs: 198-204, wherein: the amino acid in the capsid protein corresponding to amino acid positions 346, 501, 505, and/or 706 of SEQ ID NO: 14 is not the wild type amino acid. In certain embodiments, the instant disclosure provides a recombinant adeno-associated virus (AAV) capsid protein comprising an amino acid sequence that is at least 70%, at least 75%, at least 80%, at least 85%, at least 86%, at least 87%, at least 88%, at least 89%, at least 90%, at least 91%, at least 92%, at least 93%, at least 94%, at least 95%, at least 96%, at least 97%, at least 98%, or at least 99% identical to amino acids 142-736 of any one of SEQ ID NOs: 198-204, wherein: the amino acid in the capsid protein corresponding to amino acid positions 346, 501, 505, and/or 706 of SEQ ID NO: 14 is not the wild type amino acid. In certain embodiments, the instant disclosure provides a recombinant adeno-associated virus (AAV) capsid protein comprising an amino acid sequence that is at least 70%, at least 75%, at least 80%, at least 85%, at least 86%, at least 87%, at least 88%, at least 89%, at least 90%, at least 91%, at least 92%, at least 93%, at least 94%, at least 95%, at least 96%, at least 97%, at least 98%, or at least 99% identical to amino acids 1-736 of any one of SEQ ID NOs: 198-204, wherein: the amino acid in the capsid protein corresponding to amino acid positions 346, 501, 505, and/or 706 of SEQ ID NO: 14 is not the wild type amino acid.

[0145] In certain embodiments, the instant disclosure provides a recombinant adeno-associated virus (AAV) capsid protein comprising an amino acid sequence that is at least 70%, at least 75%, at least 80%, at least 85%, at least 86%, at least 87%, at least 88%, at least 89%, at least 90%, at least 91%, at least 92%, at least 93%, at least 94%, at least 95%, at least 96%, at least 97%, at least 98%, or at least 99% identical to amino acids 197-736 of any one of SEQ ID NOs: 198-204, wherein: the amino acid in the capsid protein corresponding to amino acid position 346 of SEQ ID NO: 14 is alanine; the amino acid in the capsid protein corresponding to amino acid position 501 of SEQ ID NO: 14 is isoleucine; the amino acid in the capsid protein corresponding to amino acid position 505 of SEQ ID NO: 14 is arginine; and/or the amino acid in the capsid protein corresponding to amino acid position 706 of SEQ ID NO: 14 is cysteine. In certain embodiments, the instant disclosure provides a recombinant adeno-associated virus (AAV) capsid protein comprising an amino acid sequence that is at least 70%, at least 75%, at least 80%, at least 85%, at least 86%, at least 87%, at least 88%, at least 89%, at least 90%, at least 91%, at least 92%, at least 93%, at least 94%, at least 95%, at least 96%, at least 97%, at least 98%, or at least 99% identical to amino acids 142-736 of any one of SEQ ID NOs: 198-204, wherein: the amino acid in the capsid protein corresponding to amino acid position 346 of SEQ ID NO: 14 is alanine; the amino acid in the capsid protein corresponding to amino acid position 501 of SEQ ID NO: 14 is isoleucine; the amino acid in the capsid protein corresponding to amino acid position 505 of SEQ ID NO: 14 is arginine; and/or the amino acid in the capsid protein corresponding to amino acid position 706 of SEQ ID NO: 14 is cysteine. In certain embodiments, the instant disclosure provides a recombinant adeno-associated virus (AAV) capsid protein comprising an amino acid sequence that is at least 70%, at least 75%, at least 80%, at least 85%, at least 86%, at least 87%, at least 88%, at least 89%, at least 90%, at least 91%, at least 92%, at least 93%, at least 94%, at least 95%, at least 96%, at least 97%, at least 98%, or at least 99% identical to amino acids 1-736 of any one of SEQ ID NOs: 198-204, wherein: the amino acid in the capsid protein corresponding to amino acid position 346 of SEQ ID NO: 14 is alanine; the amino acid in the capsid protein corresponding to amino acid position 501 of SEQ ID NO: 14 is isoleucine; the amino acid in the capsid protein corresponding to amino acid position 505 of SEQ ID NO: 14 is arginine; and/or the amino acid in the capsid protein corresponding to amino acid position 706 of SEQ ID NO: 14 is cysteine.

[0146] In certain embodiments, the instant disclosure provides a recombinant adeno-associated virus (AAV) capsid protein comprising an amino acid sequence that is at least 70%, at least 75%, at least 80%, at least 85%, at least 86%, at least 87%, at least 88%, at least 89%, at least 90%, at least 91%, at least 92%, at least 93%, at least 94%, at least 95%, at least 96%, at least 97%, at least 98%, or at least 99% identical to amino acids 203-735 of any one of SEQ ID NOs: 205-219, wherein: the amino acid in the capsid protein corresponding to amino acid positions 346, 501, 505, and/or 706 of SEQ ID NO: 14 is not the wild type amino acid. In certain embodiments, the instant disclosure provides a recombinant adeno-associated virus (AAV) capsid protein comprising an amino acid sequence that is at least 70%, at least 75%, at least 80%, at least 85%, at least 86%, at least 87%, at least 88%, at least 89%, at least 90%, at least 91%, at least 92%, at least 93%, at least 94%, at least 95%, at least 96%, at least 97%, at least 98%, or at least 99% identical to amino acids 138-735 of any one of SEQ ID NOs: 205-219, wherein: the amino acid in the capsid protein corresponding to amino acid positions 346, 501, 505, and/or 706 of SEQ ID NO: 14 is not the wild type amino acid. In certain embodiments, the instant disclosure provides a recombinant adeno-associated virus (AAV) capsid protein comprising an amino acid sequence that is at least 70%, at least 75%, at least 80%, at least 85%, at least 86%, at least 87%, at least 88%, at least 89%, at least 90%, at least 91%, at least 92%, at least 93%, at least 94%, at least 95%, at least 96%, at least 97%, at least 98%, or at least 99% identical to amino acids 1-735 of any one of SEQ ID NOs: 205-219, wherein: the amino acid in the capsid protein corresponding to amino acid positions 346, 501, 505, and/or 706 of SEQ ID NO: 14 is not the wild type amino acid.

[0147] In certain embodiments, the instant disclosure provides a recombinant adeno-associated virus (AAV) capsid protein comprising an amino acid sequence that is at least 70%, at least 75%, at least 80%, at least 85%, at least 86%, at least 87%, at least 88%, at least 89%, at least 90%, at least 91%, at least 92%, at least 93%, at least 94%, at least 95%, at least 96%, at least 97%, at least 98%, or at least 99% identical to amino acids 203-735 of any one of SEQ ID NOs: 205-219, wherein: the amino acid in the capsid protein corresponding to amino acid position 346 of SEQ ID NO: 14 is alanine; the amino acid in the capsid protein corresponding to amino acid position 501 of SEQ ID NO: 14 is isoleucine; the amino acid in the capsid protein corresponding to amino acid position 505 of SEQ ID NO: 14 is arginine; and/or the amino acid in the capsid protein corresponding to amino acid position 706 of SEQ ID NO: 14 is cysteine. In certain embodiments, the instant disclosure provides a recombinant adeno-associated virus (AAV) capsid protein comprising an amino acid sequence that is at least 70%, at least 75%, at least 80%, at least 85%, at least 86%, at least 87%, at least 88%, at least 89%, at least 90%, at least 91%, at least 92%, at least 93%, at least 94%, at least 95%, at least 96%, at least 97%, at least 98%, or at least 99% identical to amino acids 138-735 of any one of SEQ ID NOs: 205-219, wherein: the amino acid in the capsid protein corresponding to amino acid position 346 of SEQ ID NO: 14 is alanine; the amino acid in the capsid protein corresponding to amino acid position 501 of SEQ ID NO: 14 is isoleucine; the amino acid in the capsid protein corresponding to amino acid position 505 of SEQ ID NO: 14 is arginine; and/or the amino acid in the capsid protein corresponding to amino acid position 706 of SEQ ID NO: 14 is cysteine. In certain embodiments, the instant disclosure provides a recombinant adeno-associated virus (AAV) capsid protein comprising an amino acid sequence that is at least 70%, at least 75%, at least 80%, at least 85%, at least 86%, at least 87%, at least 88%, at least 89%, at least 90%, at least 91%, at least 92%, at least 93%, at least 94%, at least 95%, at least 96%, at least 97%, at least 98%, or at least 99% identical to amino acids 1-735 of any one of SEQ ID NOs: 205-219, wherein: the amino acid in the capsid protein corresponding to amino acid position 346 of SEQ ID NO: 14 is alanine; the amino acid in the capsid protein corresponding to amino acid position 501 of SEQ ID NO: 14 is isoleucine; the amino acid in the capsid protein corresponding to amino acid position 505 of SEQ ID NO: 14 is arginine; and/or the amino acid in the capsid protein corresponding to amino acid position 706 of SEQ ID NO: 14 is cysteine.

[0148] In certain embodiments, the instant disclosure provides a recombinant adeno-associated virus (AAV) capsid protein comprising an amino acid sequence that is at least 70%, at least 75%, at least 80%, at least 85%, at least 86%, at least 87%, at least 88%, at least 89%, at least 90%, at least 91%, at least 92%, at least 93%, at least 94%, at least 95%, at least 96%, at least 97%, at least 98%, or at least 99% identical to amino acids 193-724 of any one of SEQ ID NOs: 235-249, wherein: the amino acid in the capsid protein corresponding to amino acid positions 346, 501, 505, and/or 706 of SEQ ID NO: 14 is not the wild type amino acid. In certain embodiments, the instant disclosure provides a recombinant adeno-associated virus (AAV) capsid protein comprising an amino acid sequence that is at least 70%, at least 75%, at least 80%, at least 85%, at least 86%, at least 87%, at least 88%, at least 89%, at least 90%, at least 91%, at least 92%, at least 93%, at least 94%, at least 95%, at least 96%, at least 97%, at least 98%, or at least 99% identical to amino acids 137-724 of any one of SEQ ID NOs: 235-249, wherein: the amino acid in the capsid protein corresponding to amino acid positions 346, 501, 505, and/or 706 of SEQ ID NO: 14 is not the wild type amino acid. In certain embodiments, the instant disclosure provides a recombinant adeno-associated virus (AAV) capsid protein comprising an amino acid sequence that is at least 70%, at least 75%, at least 80%, at least 85%, at least 86%, at least 87%, at least 88%, at least 89%, at least 90%, at least 91%, at least 92%, at least 93%, at least 94%, at least 95%, at least 96%, at least 97%, at least 98%, or at least 99% identical to amino acids 1-724 of any one of SEQ ID NOs: 235-249, wherein: the amino acid in the capsid protein corresponding to amino acid positions 346, 501, 505, and/or 706 of SEQ ID NO: 14 is not the wild type amino acid.

[0149] In certain embodiments, the instant disclosure provides a recombinant adeno-associated virus (AAV) capsid protein comprising an amino acid sequence that is at least 70%, at least 75%, at least 80%, at least 85%, at least 86%, at least 87%, at least 88%, at least 89%, at least 90%, at least 91%, at least 92%, at least 93%, at least 94%, at least 95%, at least 96%, at least 97%, at least 98%, or at least 99% identical to amino acids 193-724 of any one of SEQ ID NOs: 235-249, wherein: the amino acid in the capsid protein corresponding to amino acid position 346 of SEQ ID NO: 14 is alanine; the amino acid in the capsid protein corresponding to amino acid position 501 of SEQ ID NO: 14 is isoleucine; the amino acid in the capsid protein corresponding to amino acid position 505 of SEQ ID NO: 14 is arginine; and/or the amino acid in the capsid protein corresponding to amino acid position 706 of SEQ ID NO: 14 is cysteine. In certain embodiments, the instant disclosure provides a recombinant adeno-associated virus (AAV) capsid protein comprising an amino acid sequence that is at least 70%, at least 75%, at least 80%, at least 85%, at least 86%, at least 87%, at least 88%, at least 89%, at least 90%, at least 91%, at least 92%, at least 93%, at least 94%, at least 95%, at least 96%, at least 97%, at least 98%, or at least 99% identical to amino acids 137-724 of any one of SEQ ID NOs: 235-249, wherein: the amino acid in the capsid protein corresponding to amino acid position 346 of SEQ ID NO: 14 is alanine; the amino acid in the capsid protein corresponding to amino acid position 501 of SEQ ID NO: 14 is isoleucine; the amino acid in the capsid protein corresponding to amino acid position 505 of SEQ ID NO: 14 is arginine; and/or the amino acid in the capsid protein corresponding to amino acid position 706 of SEQ ID NO: 14 is cysteine. In certain embodiments, the instant disclosure provides a recombinant adeno-associated virus (AAV) capsid protein comprising an amino acid sequence that is at least 70%, at least 75%, at least 80%, at least 85%, at least 86%, at least 87%, at least 88%, at least 89%, at least 90%, at least 91%, at least 92%, at least 93%, at least 94%, at least 95%, at least 96%, at least 97%, at least 98%, or at least 99% identical to amino acids 1-724 of any one of SEQ ID NOs: 235-249, wherein: the amino acid in the capsid protein corresponding to amino acid position 346 of SEQ ID NO: 14 is alanine; the amino acid in the capsid protein corresponding to amino acid position 501 of SEQ ID NO: 14 is isoleucine; the amino acid in the capsid protein corresponding to amino acid position 505 of SEQ ID NO: 14 is arginine; and/or the amino acid in the capsid protein corresponding to amino acid position 706 of SEQ ID NO: 14 is cysteine.

[0150] In certain embodiments, the instant disclosure provides a recombinant adeno-associated virus (AAV) capsid protein comprising an amino acid sequence that is at least 70%, at least 75%, at least 80%, at least 85%, at least 86%, at least 87%, at least 88%, at least 89%, at least 90%, at least 91%, at least 92%, at least 93%, at least 94%, at least 95%, at least 96%, at least 97%, at least 98%, or at least 99% identical to amino acids 204-738 of any one of SEQ ID NOs: 265-279, and 307-321, wherein: the amino acid in the capsid protein corresponding to amino acid positions 346, 501, 505, and/or 706 of SEQ ID NO: 14 is not the wild type amino acid. In certain embodiments, the instant disclosure provides a recombinant adeno-associated virus (AAV) capsid protein comprising an amino acid sequence that is at least 70%, at least 75%, at least 80%, at least 85%, at least 86%, at least 87%, at least 88%, at least 89%, at least 90%, at least 91%, at least 92%, at least 93%, at least 94%, at least 95%, at least 96%, at least 97%, at least 98%, or at least 99% identical to amino acids 138-738 of any one of SEQ ID NOs: 265-279, and 307-321, wherein: the amino acid in the capsid protein corresponding to amino acid positions 346, 501, 505, and/or 706 of SEQ ID NO: 14 is not the wild type amino acid. In certain embodiments, the instant disclosure provides a recombinant adeno-associated virus (AAV) capsid protein comprising an amino acid sequence that is at least 70%, at least 75%, at least 80%, at least 85%, at least 86%, at least 87%, at least 88%, at least 89%, at least 90%, at least 91%, at least 92%, at least 93%, at least 94%, at least 95%, at least 96%, at least 97%, at least 98%, or at least 99% identical to amino acids 1-738 of any one of SEQ ID NOs: 265-279, and 307-321, wherein: the amino acid in the capsid protein corresponding to amino acid positions 346, 501, 505, and/or 706 of SEQ ID NO: 14 is not the wild type amino acid.

[0151] In certain embodiments, the instant disclosure provides a recombinant adeno-associated virus (AAV) capsid protein comprising an amino acid sequence that is at least 70%, at least 75%, at least 80%, at least 85%, at least 86%, at least 87%, at least 88%, at least 89%, at least 90%, at least 91%, at least 92%, at least 93%, at least 94%, at least 95%, at least 96%, at least 97%, at least 98%, or at least 99% identical to amino acids 204-738 of any one of SEQ ID NOs: 265-279, and 307-321, wherein: the amino acid in the capsid protein corresponding to amino acid position 346 of SEQ ID NO: 14 is alanine; the amino acid in the capsid protein corresponding to amino acid position 501 of SEQ ID NO: 14 is isoleucine; the amino acid in the capsid protein corresponding to amino acid position 505 of SEQ ID NO: 14 is arginine; and/or the amino acid in the capsid protein corresponding to amino acid position 706 of SEQ ID NO: 14 is cysteine. In certain embodiments, the instant disclosure provides a recombinant adeno-associated virus (AAV) capsid protein comprising an amino acid sequence that is at least 70%, at least 75%, at least 80%, at least 85%, at least 86%, at least 87%, at least 88%, at least 89%, at least 90%, at least 91%, at least 92%, at least 93%, at least 94%, at least 95%, at least 96%, at least 97%, at least 98%, or at least 99% identical to amino acids 138-738 of any one of SEQ ID NOs: 265-279, and 307-321, wherein: the amino acid in the capsid protein corresponding to amino acid position 346 of SEQ ID NO: 14 is alanine; the amino acid in the capsid protein corresponding to amino acid position 501 of SEQ ID NO: 14 is isoleucine; the amino acid in the capsid protein corresponding to amino acid position 505 of SEQ ID NO: 14 is arginine; and/or the amino acid in the capsid protein corresponding to amino acid position 706 of SEQ ID NO: 14 is cysteine. In certain embodiments, the instant disclosure provides a recombinant adeno-associated virus (AAV) capsid protein comprising an amino acid sequence that is at least 70%, at least 75%, at least 80%, at least 85%, at least 86%, at least 87%, at least 88%, at least 89%, at least 90%, at least 91%, at least 92%, at least 93%, at least 94%, at least 95%, at least 96%, at least 97%, at least 98%, or at least 99% identical to amino acids 1-738 of any one of SEQ ID NOs: 265-279, and 307-321, wherein: the amino acid in the capsid protein corresponding to amino acid position 346 of SEQ ID NO: 14 is alanine; the amino acid in the capsid protein corresponding to amino acid position 501 of SEQ ID NO: 14 is isoleucine; the amino acid in the capsid protein corresponding to amino acid position 505 of SEQ ID NO: 14 is arginine; and/or the amino acid in the capsid protein corresponding to amino acid position 706 of SEQ ID NO: 14 is cysteine.

[0152] In certain embodiments, the instant disclosure provides a recombinant adeno-associated virus (AAV) capsid protein comprising an amino acid sequence that is at least 70%, at least 75%, at least 80%, at least 85%, at least 86%, at least 87%, at least 88%, at least 89%, at least 90%, at least 91%, at least 92%, at least 93%, at least 94%, at least 95%, at least 96%, at least 97%, at least 98%, or at least 99% identical to amino acids 203-737 of any one of SEQ ID NOs: 337-366, wherein: the amino acid in the capsid protein corresponding to amino acid positions 346, 501, 505, and/or 706 of SEQ ID NO: 14 is not the wild type amino acid. In certain embodiments, the instant disclosure provides a recombinant adeno-associated virus (AAV) capsid protein comprising an amino acid sequence that is at least 70%, at least 75%, at least 80%, at least 85%, at least 86%, at least 87%, at least 88%, at least 89%, at least 90%, at least 91%, at least 92%, at least 93%, at least 94%, at least 95%, at least 96%, at least 97%, at least 98%, or at least 99% identical to amino acids 138-737 of any one of SEQ ID NOs: 337-366, wherein: the amino acid in the capsid protein corresponding to amino acid positions 346, 501, 505, and/or 706 of SEQ ID NO: 14 is not the wild type amino acid. In certain embodiments, the instant disclosure provides a recombinant adeno-associated virus (AAV) capsid protein comprising an amino acid sequence that is at least 70%, at least 75%, at least 80%, at least 85%, at least 86%, at least 87%, at least 88%, at least 89%, at least 90%, at least 91%, at least 92%, at least 93%, at least 94%, at least 95%, at least 96%, at least 97%, at least 98%, or at least 99% identical to amino acids 1-737 of any one of SEQ ID NOs: 337-366, wherein: the amino acid in the capsid protein corresponding to amino acid positions 346, 501, 505, and/or 706 of SEQ ID NO: 14 is not the wild type amino acid.

[0153] In certain embodiments, the instant disclosure provides a recombinant adeno-associated virus (AAV) capsid protein comprising an amino acid sequence that is at least 70%, at least 75%, at least 80%, at least 85%, at least 86%, at least 87%, at least 88%, at least 89%, at least 90%, at least 91%, at least 92%, at least 93%, at least 94%, at least 95%, at least 96%, at least 97%, at least 98%, or at least 99% identical to amino acids 203-737 of any one of SEQ ID NOs: 337-366, wherein: the amino acid in the capsid protein corresponding to amino acid position 346 of SEQ ID NO: 14 is alanine; the amino acid in the capsid protein corresponding to amino acid position 501 of SEQ ID NO: 14 is isoleucine; the amino acid in the capsid protein corresponding to amino acid position 505 of SEQ ID NO: 14 is arginine; and/or the amino acid in the capsid protein corresponding to amino acid position 706 of SEQ ID NO: 14 is cysteine. In certain embodiments, the instant disclosure provides a recombinant adeno-associated virus (AAV) capsid protein comprising an amino acid sequence that is at least 70%, at least 75%, at least 80%, at least 85%, at least 86%, at least 87%, at least 88%, at least 89%, at least 90%, at least 91%, at least 92%, at least 93%, at least 94%, at least 95%, at least 96%, at least 97%, at least 98%, or at least 99% identical to amino acids 138-737 of any one of SEQ ID NOs: 337-366, wherein: the amino acid in the capsid protein corresponding to amino acid position 346 of SEQ ID NO: 14 is alanine; the amino acid in the capsid protein corresponding to amino acid position 501 of SEQ ID NO: 14 is isoleucine; the amino acid in the capsid protein corresponding to amino acid position 505 of SEQ ID NO: 14 is arginine; and/or the amino acid in the capsid protein corresponding to amino acid position 706 of SEQ ID NO: 14 is cysteine. In certain embodiments, the instant disclosure provides a recombinant adeno-associated virus (AAV) capsid protein comprising an amino acid sequence that is at least 70%, at least 75%, at least 80%, at least 85%, at least 86%, at least 87%, at least 88%, at least 89%, at least 90%, at least 91%, at least 92%, at least 93%, at least 94%, at least 95%, at least 96%, at least 97%, at least 98%, or at least 99% identical to amino acids 1-737 of any one of SEQ ID NOs: 337-366, wherein: the amino acid in the capsid protein corresponding to amino acid position 346 of SEQ ID NO: 14 is alanine; the amino acid in the capsid protein corresponding to amino acid position 501 of SEQ ID NO: 14 is isoleucine; the amino acid in the capsid protein corresponding to amino acid position 505 of SEQ ID NO: 14 is arginine; and/or the amino acid in the capsid protein corresponding to amino acid position 706 of SEQ ID NO: 14 is cysteine.

[0154] In certain embodiments, the instant disclosure provides a recombinant adeno-associated virus (AAV) capsid protein comprising an amino acid sequence that is at least 70%, at least 75%, at least 80%, at least 85%, at least 86%, at least 87%, at least 88%, at least 89%, at least 90%, at least 91%, at least 92%, at least 93%, at least 94%, at least 95%, at least 96%, at least 97%, at least 98%, or at least 99% identical to amino acids 203-738 of any one of SEQ ID NOs: 367-381, wherein: the amino acid in the capsid protein corresponding to amino acid positions 346, 501, 505, and/or 706 of SEQ ID NO: 14 is not the wild type amino acid. In certain embodiments, the instant disclosure provides a recombinant adeno-associated virus (AAV) capsid protein comprising an amino acid sequence that is at least 70%, at least 75%, at least 80%, at least 85%, at least 86%, at least 87%, at least 88%, at least 89%, at least 90%, at least 91%, at least 92%, at least 93%, at least 94%, at least 95%, at least 96%, at least 97%, at least 98%, or at least 99% identical to amino acids 138-738 of any one of SEQ ID NOs: 367-381, wherein: the amino acid in the capsid protein corresponding to amino acid positions 346, 501, 505, and/or 706 of SEQ ID NO: 14 is not the wild type amino acid. In certain embodiments, the instant disclosure provides a recombinant adeno-associated virus (AAV) capsid protein comprising an amino acid sequence that is at least 70%, at least 75%, at least 80%, at least 85%, at least 86%, at least 87%, at least 88%, at least 89%, at least 90%, at least 91%, at least 92%, at least 93%, at least 94%, at least 95%, at least 96%, at least 97%, at least 98%, or at least 99% identical to amino acids 1-738 of any one of SEQ ID NOs: 367-381, wherein: the amino acid in the capsid protein corresponding to amino acid positions 346, 501, 505, and/or 706 of SEQ ID NO: 14 is not the wild type amino acid.

[0155] In certain embodiments, the instant disclosure provides a recombinant adeno-associated virus (AAV) capsid protein comprising an amino acid sequence that is at least 70%, at least 75%, at least 80%, at least 85%, at least 86%, at least 87%, at least 88%, at least 89%, at least 90%, at least 91%, at least 92%, at least 93%, at least 94%, at least 95%, at least 96%, at least 97%, at least 98%, or at least 99% identical to amino acids 203-738 of any one of SEQ ID NOs: 367-381, wherein: the amino acid in the capsid protein corresponding to amino acid position 346 of SEQ ID NO: 14 is alanine; the amino acid in the capsid protein corresponding to amino acid position 501 of SEQ ID NO: 14 is isoleucine; the amino acid in the capsid protein corresponding to amino acid position 505 of SEQ ID NO: 14 is arginine; and/or the amino acid in the capsid protein corresponding to amino acid position 706 of SEQ ID NO: 14 is cysteine. In certain embodiments, the instant disclosure provides a recombinant adeno-associated virus (AAV) capsid protein comprising an amino acid sequence that is at least 70%, at least 75%, at least 80%, at least 85%, at least 86%, at least 87%, at least 88%, at least 89%, at least 90%, at least 91%, at least 92%, at least 93%, at least 94%, at least 95%, at least 96%, at least 97%, at least 98%, or at least 99% identical to amino acids 138-738 of any one of SEQ ID NOs: 367-381, wherein: the amino acid in the capsid protein corresponding to amino acid position 346 of SEQ ID NO: 14 is alanine; the amino acid in the capsid protein corresponding to amino acid position 501 of SEQ ID NO: 14 is isoleucine; the amino acid in the capsid protein corresponding to amino acid position 505 of SEQ ID NO: 14 is arginine; and/or the amino acid in the capsid protein corresponding to amino acid position 706 of SEQ ID NO: 14 is cysteine. In certain embodiments, the instant disclosure provides a recombinant adeno-associated virus (AAV) capsid protein comprising an amino acid sequence that is at least 70%, at least 75%, at least 80%, at least 85%, at least 86%, at least 87%, at least 88%, at least 89%, at least 90%, at least 91%, at least 92%, at least 93%, at least 94%, at least 95%, at least 96%, at least 97%, at least 98%, or at least 99% identical to amino acids 1-738 of any one of SEQ ID NOs: 367-381, wherein: the amino acid in the capsid protein corresponding to amino acid position 346 of SEQ ID NO: 14 is alanine; the amino acid in the capsid protein corresponding to amino acid position 501 of SEQ ID NO: 14 is isoleucine; the amino acid in the capsid protein corresponding to amino acid position 505 of SEQ ID NO: 14 is arginine; and/or the amino acid in the capsid protein corresponding to amino acid position 706 of SEQ ID NO: 14 is cysteine.

[0156] In certain embodiments, the instant disclosure provides a recombinant adeno-associated virus (AAV) capsid protein comprising an amino acid sequence that is at least 70%, at least 75%, at least 80%, at least 85%, at least 86%, at least 87%, at least 88%, at least 89%, at least 90%, at least 91%, at least 92%, at least 93%, at least 94%, at least 95%, at least 96%, at least 97%, at least 98%, or at least 99% identical to amino acids 202-729 of any one of SEQ ID NOs: 322-336, wherein: the amino acid in the capsid protein corresponding to amino acid positions 346, 501, 505, and/or 706 of SEQ ID NO: 14 is not the wild type amino acid. In certain embodiments, the instant disclosure provides a recombinant adeno-associated virus (AAV) capsid protein comprising an amino acid sequence that is at least 70%, at least 75%, at least 80%, at least 85%, at least 86%, at least 87%, at least 88%, at least 89%, at least 90%, at least 91%, at least 92%, at least 93%, at least 94%, at least 95%, at least 96%, at least 97%, at least 98%, or at least 99% identical to amino acids 136-729 of any one of SEQ ID NOs: 322-336, wherein: the amino acid in the capsid protein corresponding to amino acid positions 346, 501, 505, and/or 706 of SEQ ID NO: 14 is not the wild type amino acid. In certain embodiments, the instant disclosure provides a recombinant adeno-associated virus (AAV) capsid protein comprising an amino acid sequence that is at least 70%, at least 75%, at least 80%, at least 85%, at least 86%, at least 87%, at least 88%, at least 89%, at least 90%, at least 91%, at least 92%, at least 93%, at least 94%, at least 95%, at least 96%, at least 97%, at least 98%, or at least 99% identical to amino acids 1-729 of any one of SEQ ID NOs: 322-336, wherein: the amino acid in the capsid protein corresponding to amino acid positions 346, 501, 505, and/or 706 of SEQ ID NO: 14 is not the wild type amino acid.

[0157] In certain embodiments, the instant disclosure provides a recombinant adeno-associated virus (AAV) capsid protein comprising an amino acid sequence that is at least 70%, at least 75%, at least 80%, at least 85%, at least 86%, at least 87%, at least 88%, at least 89%, at least 90%, at least 91%, at least 92%, at least 93%, at least 94%, at least 95%, at least 96%, at least 97%, at least 98%, or at least 99% identical to amino acids 202-729 of any one of SEQ ID NOs: 322-336, wherein: the amino acid in the capsid protein corresponding to amino acid position 346 of SEQ ID NO: 14 is alanine; the amino acid in the capsid protein corresponding to amino acid position 501 of SEQ ID NO: 14 is isoleucine; the amino acid in the capsid protein corresponding to amino acid position 505 of SEQ ID NO: 14 is arginine; and/or the amino acid in the capsid protein corresponding to amino acid position 706 of SEQ ID NO: 14 is cysteine. In certain embodiments, the instant disclosure provides a recombinant adeno-associated virus (AAV) capsid protein comprising an amino acid sequence that is at least 70%, at least 75%, at least 80%, at least 85%, at least 86%, at least 87%, at least 88%, at least 89%, at least 90%, at least 91%, at least 92%, at least 93%, at least 94%, at least 95%, at least 96%, at least 97%, at least 98%, or at least 99% identical to amino acids 136-729 of any one of SEQ ID NOs: 322-336, wherein: the amino acid in the capsid protein corresponding to amino acid position 346 of SEQ ID NO: 14 is alanine; the amino acid in the capsid protein corresponding to amino acid position 501 of SEQ ID NO: 14 is isoleucine; the amino acid in the capsid protein corresponding to amino acid position 505 of SEQ ID NO: 14 is arginine; and/or the amino acid in the capsid protein corresponding to amino acid position 706 of SEQ ID NO: 14 is cysteine. In certain embodiments, the instant disclosure provides a recombinant adeno-associated virus (AAV) capsid protein comprising an amino acid sequence that is at least 70%, at least 75%, at least 80%, at least 85%, at least 86%, at least 87%, at least 88%, at least 89%, at least 90%, at least 91%, at least 92%, at least 93%, at least 94%, at least 95%, at least 96%, at least 97%, at least 98%, or at least 99% identical to amino acids 1-729 of any one of SEQ ID NOs: 322-336, wherein: the amino acid in the capsid protein corresponding to amino acid position 346 of SEQ ID NO: 14 is alanine; the amino acid in the capsid protein corresponding to amino acid position 501 of SEQ ID NO: 14 is isoleucine; the amino acid in the capsid protein corresponding to amino acid position 505 of SEQ ID NO: 14 is arginine; and/or the amino acid in the capsid protein corresponding to amino acid position 706 of SEQ ID NO: 14 is cysteine.

[0158] In certain embodiments, the instant disclosure provides a recombinant adeno-associated virus (AAV) capsid protein comprising an amino acid sequence that is at least 70%, at least 75%, at least 80%, at least 85%, at least 86%, at least 87%, at least 88%, at least 89%, at least 90%, at least 91%, at least 92%, at least 93%, at least 94%, at least 95%, at least 96%, at least 97%, at least 98%, or at least 99% identical to amino acids 204-738 of any one of SEQ ID NOs: 382-396, wherein: the amino acid in the capsid protein corresponding to amino acid positions 346, 501, 505, and/or 706 of SEQ ID NO: 14 is not the wild type amino acid. In certain embodiments, the instant disclosure provides a recombinant adeno-associated virus (AAV) capsid protein comprising an amino acid sequence that is at least 70%, at least 75%, at least 80%, at least 85%, at least 86%, at least 87%, at least 88%, at least 89%, at least 90%, at least 91%, at least 92%, at least 93%, at least 94%, at least 95%, at least 96%, at least 97%, at least 98%, or at least 99% identical to amino acids 138-738 of any one of SEQ ID NOs: 382-396, wherein: the amino acid in the capsid protein corresponding to amino acid positions 346, 501, 505, and/or 706 of SEQ ID NO: 14 is not the wild type amino acid. In certain embodiments, the instant disclosure provides a recombinant adeno-associated virus (AAV) capsid protein comprising an amino acid sequence that is at least 70%, at least 75%, at least 80%, at least 85%, at least 86%, at least 87%, at least 88%, at least 89%, at least 90%, at least 91%, at least 92%, at least 93%, at least 94%, at least 95%, at least 96%, at least 97%, at least 98%, or at least 99% identical to amino acids 1-738 of any one of SEQ ID NOs: 382-396, wherein: the amino acid in the capsid protein corresponding to amino acid positions 346, 501, 505, and/or 706 of SEQ ID NO: 14 is not the wild type amino acid.

[0159] In certain embodiments, the instant disclosure provides a recombinant adeno-associated virus (AAV) capsid protein comprising an amino acid sequence that is at least 70%, at least 75%, at least 80%, at least 85%, at least 86%, at least 87%, at least 88%, at least 89%, at least 90%, at least 91%, at least 92%, at least 93%, at least 94%, at least 95%, at least 96%, at least 97%, at least 98%, or at least 99% identical to amino acids 204-738 of any one of SEQ ID NOs: 382-396, wherein: the amino acid in the capsid protein corresponding to amino acid position 346 of SEQ ID NO: 14 is alanine; the amino acid in the capsid protein corresponding to amino acid position 501 of SEQ ID NO: 14 is isoleucine; the amino acid in the capsid protein corresponding to amino acid position 505 of SEQ ID NO: 14 is arginine; and/or the amino acid in the capsid protein corresponding to amino acid position 706 of SEQ ID NO: 14 is cysteine. In certain embodiments, the instant disclosure provides a recombinant adeno-associated virus (AAV) capsid protein comprising an amino acid sequence that is at least 70%, at least 75%, at least 80%, at least 85%, at least 86%, at least 87%, at least 88%, at least 89%, at least 90%, at least 91%, at least 92%, at least 93%, at least 94%, at least 95%, at least 96%, at least 97%, at least 98%, or at least 99% identical to amino acids 138-738 of any one of SEQ ID NOs: 382-396, wherein: the amino acid in the capsid protein corresponding to amino acid position 346 of SEQ ID NO: 14 is alanine; the amino acid in the capsid protein corresponding to amino acid position 501 of SEQ ID NO: 14 is isoleucine; the amino acid in the capsid protein corresponding to amino acid position 505 of SEQ ID NO: 14 is arginine; and/or the amino acid in the capsid protein corresponding to amino acid position 706 of SEQ ID NO: 14 is cysteine. In certain embodiments, the instant disclosure provides a recombinant adeno-associated virus (AAV) capsid protein comprising an amino acid sequence that is at least 70%, at least 75%, at least 80%, at least 85%, at least 86%, at least 87%, at least 88%, at least 89%, at least 90%, at least 91%, at least 92%, at least 93%, at least 94%, at least 95%, at least 96%, at least 97%, at least 98%, or at least 99% identical to amino acids 1-738 of any one of SEQ ID NOs: 382-396, wherein: the amino acid in the capsid protein corresponding to amino acid position 346 of SEQ ID NO: 14 is alanine; the amino acid in the capsid protein corresponding to amino acid position 501 of SEQ ID NO: 14 is isoleucine; the amino acid in the capsid protein corresponding to amino acid position 505 of SEQ ID NO: 14 is arginine; and/or the amino acid in the capsid protein corresponding to amino acid position 706 of SEQ ID NO: 14 is cysteine.

### III. POLYNUCLEOTIDES, VECTORS, AND METHODS OF PRODUCING AAV CAPSIDS

[0160] In another aspect, the instant disclosure provides an isolated polynucleotide encoding a recombinant AAV capsid protein disclosed herein.

[0161] In certain embodiments, the instant disclosure provides a polynucleotide encoding a recombinant adeno-associated virus (AAV) capsid protein, wherein the amino acid in the capsid protein corresponding to amino acid positions 346, 501, 505, and/or 706 of SEQ ID NO: 14 is not the wild type amino acid. In certain embodiments, the instant disclosure provides a polynucleotide encoding a recombinant adeno-associated virus (AAV) capsid protein, wherein: the amino acid in the capsid protein corresponding to amino acid position 346 of SEQ ID NO: 14 is alanine; the amino acid in the capsid protein corresponding to amino acid position 501 of SEQ ID NO: 14 is isoleucine; the amino acid in the capsid protein corresponding to amino acid position 505 of SEQ ID NO: 14 is arginine; and/or the amino acid in the capsid protein corresponding to amino acid position 706 of SEQ ID NO: 14 is cysteine, and wherein the capsid protein does not comprise the amino acid sequence of amino acids 203-736 of SEQ ID NOs: 11-15.

[0162] In certain embodiments, the polynucleotide is optimized, e.g., by codon/RNA optimization, replacement with heterologous signal sequences, and/or elimination of mRNA instability elements. Methods to generate optimized polynucleotides for recombinant expression by introducing codon changes and/or eliminating inhibitory regions in the mRNA can be carried out by adapting the optimization methods described in, e.g., U.S. Pat. Nos. 5,965,726; 6,174,666; 6,291,664; 6,414,132; and 6,794,498, accordingly, all of which are herein incorporated by reference in their entireties. For example, potential splice sites and instability elements (e.g., A/T or A/U rich elements) within the RNA can be mutated without altering the amino acids encoded by the nucleic acid sequences to increase stability of the RNA for recombinant expression. The alterations utilize the degeneracy of the genetic code, e.g., using an alternative codon for an identical amino acid. In certain embodiments, it can be desirable to alter one or more codons to encode a conservative mutation, e.g., a similar amino acid with similar chemical structure and properties and/or function as the original amino acid. Such methods can increase expression of the encoded capsid protein relative to the expression of the capsid encoded by polynucleotides that have not been optimized.

[0163] In another aspect the instant disclosure provides a vector comprising a polynucleotide disclosed herein. Suitable vectors, include, without limitation, plasmids, viruses, cosmids, artificial chromosomes, linear DNA, and mRNA. In certain embodiments, the vector is a plasmid or a viral vector. In certain embodiments, the vector is a retrovirus vector, a herpes virus vector, a baculovirus vector, or an adenovirus vector. In certain embodiments, the vector is an expression vector.

[0164] Vectors (e.g., expression vectors) can be introduced into cells (using any techniques known in the art) for propagation of the vector and/or for expression of an AAV capsid protein encoded by the vector. Accordingly, in another aspect, the instant disclosure provides a recombinant cell comprising a polynucleotide or a vector (e.g., an expression vector) disclosed herein. And further, in another aspect, the instant disclosure provides a method of producing an AAV capsid protein, the method comprising culturing the recombinant cell under conditions whereby the polynucleotide is expressed and the capsid is produced.

[0165] Suitable vectors, include, without limitation, plasmids, minimal vectors (e.g., minicircles, Nanoplasmids™, doggybones, MIDGE vectors, and the like), viruses, cosmids, artificial chromosomes, linear DNA, and mRNA. In certain embodiments, the first nucleic acid vector and/or the second nucleic acid vector is a DNA plasmid or a DNA minimal vector. Any DNA plasmid or DNA minimal vector that can accommodate the necessary vector elements can be used for the first nucleic acid vector and the second nucleic acid vector. Suitable DNA minimal vectors include, without limitation, linear covalently closed DNA (e.g., ministring DNA), linear covalently closed dumbbell shaped DNA (e.g., doggybone DNA, dumbbell DNA), minicircles, Nanoplasmids™, minimalistic immunologically defined gene expression (MIDGE) vectors, and others known to those of skill in the art. DNA minimal vectors and their methods of production are described in, e.g., U.S. Patent Application Nos. 20100233814; 20120282283; 20130216562; 20150218565; 20150218586; 20160008488; 20160215296; 20160355827; 20190185924; 20200277624; and 20210010021, all of which are herein incorporated by reference in their entireties.

[0166] A variety of host cells and expression vector systems can be utilized to express the capsid proteins described herein. Such expression systems represent vehicles by which the coding sequences of interest can be produced and subsequently purified, but also represent cells which can, when transformed or transfected with the appropriate nucleotide coding sequences, express a capsid protein described herein in situ. These include but are not limited to microorganisms such as bacteria (e.g., E. coli and B. subtilis) transformed with, e.g., recombinant bacteriophage DNA, plasmid DNA, or cosmid DNA expression vectors containing capsid protein coding sequences; yeast (e.g., Saccharomyces Pichia) transformed with, e.g., recombinant yeast expression vectors containing capsid protein coding sequences; insect cell systems infected with, e.g., recombinant virus expression vectors (e.g., baculovirus) containing capsid protein coding sequences; plant cell systems (e.g., green algae such as Chlamydomonas reinhardtii) infected with, e.g., recombinant virus expression vectors (e.g., cauliflower mosaic virus, CaMV; tobacco mosaic virus, TMV) or transformed with, e.g., recombinant plasmid expression vectors (e.g., Ti plasmid) containing capsid protein coding sequences; or mammalian cell systems (e.g., COS (e.g., COS1 or COS), CHO, BHK, MDCK, HEK 293, NSO, PER.C6, VERO, CRL7O3O, HsS78Bst, HeLa, and NIH 3T3, HEK-293T, HepG2, SP210, R1.1, B-W, L-M, BSC1, BSC40, YB/20 and BMT10 cells) harboring, e.g., recombinant expression constructs containing promoters derived from the genome of mammalian cells (e.g., metallothionein promoter) or from mammalian viruses (e.g., the adenovirus late promoter; the vaccinia virus 7.5K promoter). In certain embodiments, cells for expressing the capsid proteins described herein are human cells, e.g., human cell lines. In certain embodiments, a mammalian expression vector is pOptiVEC™ or pcDNA3.3. In certain embodiments, bacterial cells such as Escherichia coli, or eukaryotic cells (e.g., mammalian cells), are used for the expression of a capsid protein. For example, mammalian cells such as CHO or HEK293 cells, in conjunction with a vector such as the major intermediate early gene promoter element from human cytomegalovirus is an effective expression system for capsid proteins disclosed herein.

[0167] In bacterial systems, a number of expression vectors can be advantageously selected depending upon the use intended for the capsid protein being expressed. For example, when a large quantity of a capsid protein is to be produced, vectors which direct the expression of high levels of fusion protein products that are readily purified can be desirable. Such vectors include, but are not limited to, the E. coli expression vector pUR278 (Ruether U & Mueller-Hill B (1983) EMBO J 2: 1791-1794), in which the capsid protein coding sequence can be ligated individually into the vector in frame with the lac Z coding region so that a fusion protein is produced; pIN vectors (Inouye S & Inouye M (1985) Nuc Acids Res 13: 3101-3109; Van Heeke G & Schuster S M (1989) J Biol Chem 24: 5503-5509); and the like, all of which are herein incorporated by reference in their entireties. For example, pGEX vectors can also be used to express foreign polypeptides as fusion proteins with glutathione 5-transferase (GST). In general, such fusion proteins are soluble and can easily be purified from lysed cells by adsorption and binding to matrix glutathione agarose beads followed by elution in the presence of free glutathione. The pGEX vectors are designed to include thrombin or factor Xa protease cleavage sites so that the cloned target gene product can be released from the GST moiety.

[0168] In an insect system, Autographa californica nuclear polyhedrosis virus (AcNPV), for example, can be used as a vector to express foreign genes. The virus grows in Spodoptera frugiperda cells. The capsid protein coding sequence can be cloned individually into non-essential regions (for example the polyhedrin gene) of the virus and placed under control of an AcNPV promoter (for example the polyhedrin promoter).

[0169] In mammalian host cells, a number of viral-based expression systems can be utilized. In cases where an adenovirus is used as an expression vector, the capsid protein coding sequence of interest can be ligated to an adenovirus transcription/translation control complex, e.g., the late promoter and tripartite leader sequence. This chimeric gene can then be inserted in the adenovirus genome by in vitro or in vivo recombination. Insertion in a non-essential region of the viral genome (e.g., region E1 or E3) will result in a recombinant virus that is viable and capable of expressing the capsid protein molecule in infected hosts (see, e.g., Logan J & Shenk T (1984) PNAS 81(12): 3655-9, which is herein incorporated by reference in its entirety). Specific initiation signals can also be required for efficient translation of inserted capsid protein coding sequences. These signals include the ATG initiation codon and adjacent sequences. Furthermore, the initiation codon must be in phase with the reading frame of the desired coding sequence to ensure translation of the entire insert. These exogenous translational control signals and initiation codons can be of a variety of origins, both natural and synthetic. The efficiency of expression can be enhanced by the inclusion of appropriate transcription enhancer elements, transcription terminators, etc. (see, e.g., Bitter G et al. (1987) Methods Enzymol. 153: 516-544, which is herein incorporated by reference in its entirety).

[0170] In addition, a host cell strain can be chosen which modulates the expression of the inserted sequences, or modifies and processes the gene product in the specific fashion desired. Such modifications (e.g., glycosylation) and processing (e.g., cleavage) of protein products can be important for the function of the protein. Different host cells have characteristic and specific mechanisms for the post-translational processing and modification of proteins and gene products. Appropriate cell lines or host systems can be chosen to ensure the correct modification and processing of the foreign protein expressed. To this end, eukaryotic host cells which possess the cellular machinery for proper processing of the primary transcript, glycosylation, and phosphorylation of the gene product can be used. Such mammalian host cells include but are not limited to CHO, VERO, BHK, Hela, MDCK, HEK 293, NIH 3T3, W138, BT483, Hs578T, HTB2, BT20 and T47D, NSO (a murine myeloma cell line that does not endogenously produce any immunoglobulin chains), CRL7O3O, COS (e.g., COS1 or COS), PER.C6, VERO, HEK-293T, HepG2, SP210, R1.1, B-W, L-M, BSC1, BSC40, YB/20, BMT10, and HsS78Bst cells.

[0171] For long-term, high-yield production of recombinant proteins, stable expression cells can be generated. For example, cell lines which stably express a capsid protein described herein can be engineered.

[0172] In certain embodiments, rather than using expression vectors which contain viral origins of replication, host cells can be transformed with a polynucleotide (e.g., DNA or RNA) controlled by appropriate transcriptional regulatory elements (e.g., promoter, enhancer, sequences, transcription terminators, polyadenylation sites, etc.), and a selectable marker. Following the introduction of polynucleotide, engineered cells can be allowed to grow for 1-2 days in an enriched media, and then are switched to a selective media. The selectable marker in the recombinant plasmid confers resistance to the selection and allows cells to stably integrate the plasmid into their chromosomes and grow to form foci which in turn can be cloned and expanded into cell lines. This method can advantageously be used to engineer cell lines which express a capsid protein described herein or a fragment thereof.

[0173] A number of selection systems can be used, including but not limited to the herpes simplex virus thymidine kinase (Wigler M et al. (1977) Cell 11(1): 223-32); hypoxanthineguanine phosphoribosyltransferase (Szybalska E H & Szybalski W (1962) PNAS 48(12): 2026-2034); and adenine phosphoribosyltransferase (Lowy I et al. (1980) Cell 22(3): 817-23) genes in tk-, hgprt- or aprt-cells, respectively, all of which are herein incorporated by reference in their entireties. Also, antimetabolite resistance can be used as the basis of selection for the following genes: dhfr, which confers resistance to methotrexate (Wigler M et al. (1980) PNAS 77(6): 3567-70; O'Hare K et al. (1981) PNAS 78: 1527-31); gpt, which confers resistance to mycophenolic acid (Mulligan R C & Berg P (1981) PNAS 78(4): 2072-6); neo, which confers resistance to the aminoglycoside G-418 (Wu G Y & Wu C H (1991) Biotherapy 3: 87-95; Tolstoshev P (1993) Ann Rev Pharmacol Toxicol 32: 573-596; Mulligan R C (1993) Science 260: 926-932; and Morgan R A & Anderson W F (1993) Ann Rev Biochem 62: 191-217; Nabel G J & Felgner P L (1993) Trends Biotechnol 11(5): 211-5); and hygro, which confers resistance to hygromycin (Santerre R F et al. (1984) Gene 30(1-3): 147-56), all of which are herein incorporated by reference in their entireties. Methods commonly known in the art of recombinant DNA technology can be routinely applied to select the desired recombinant clone and such methods are described, for example, in Ausubel F M et al. (eds.), Current Protocols in Molecular Biology, John Wiley & Sons, N Y (1993); Kriegler M, Gene Transfer and Expression, A Laboratory Manual, Stockton Press, N Y (1990); and in Chapters 12 and 13, Dracopoli N C et al. (eds.), Current Protocols in Human Genetics, John Wiley & Sons, N Y (1994); Colbere-Garapin F et al. (1981) J Mol Biol 150: 1-14, all of which are herein incorporated by reference in their entireties.

### IV. AAV COMPOSITIONS

[0174] In another aspect, the instant disclosure provides an rAAV composition comprising a capsid comprising a recombinant AAV capsid protein disclosed herein.

[0175] In certain embodiments, the instant disclosure provides an rAAV composition comprising a capsid comprising a recombinant adeno-associated virus (AAV) capsid protein, wherein the amino acid in the capsid protein corresponding to amino acid positions 346, 501, 505, and/or 706 of SEQ ID NO: 14 is not the wild type amino acid. In certain embodiments, the instant disclosure provides an rAAV composition comprising a capsid comprising a recombinant adeno-associated virus (AAV) capsid protein, wherein: the amino acid in the capsid protein corresponding to amino acid position 346 of SEQ ID NO: 14 is alanine; the amino acid in the capsid protein corresponding to amino acid position 501 of SEQ ID NO: 14 is isoleucine; the amino acid in the capsid protein corresponding to amino acid position 505 of SEQ ID NO: 14 is arginine; and/or the amino acid in the capsid protein corresponding to amino acid position 706 of SEQ ID NO: 14 is cysteine, and wherein the capsid protein does not comprise the amino acid sequence of amino acids 203-736 of SEQ ID NOs: 11-15.

[0176] In another aspect, the instant disclosure provides an rAAV comprising a capsid comprising one or more recombinant capsid proteins disclosed herein; and an rAAV genome. The rAAVs disclosed herein generally comprise a recombinant genome (e.g., an rAAV genome) packaged within the capsid. The rAAV genome can be of any type that is capable of being packages within an AAV capsid disclosed herein. For example, in certain embodiments, the rAAV genome is a single-stranded DNA genome. In certain embodiments, the rAAV genome is a self-complementary genome, for example as described in U.S. Pat. No. 7,790,154, which is hereby incorporated by reference in its entirety.

[0177] In certain embodiments, the rAAV genome comprises a transgene. In certain embodiments, the transgene encodes a polypeptide. In certain embodiments, the transgene encodes a therapeutic protein. In certain embodiments, the transgene encodes an antibody or a fragment thereof (e.g., a Fab, scFv, or full-length antibody). In certain embodiments, the transgene encodes an scFv, nanobody, or VHH. In certain embodiments, the transgene encodes a non-coding RNA.

[0178] In certain embodiments, the rAAV genome comprises a transgene. In certain embodiments the transgene comprises one or more sequences encoding an RNA molecule. Suitable RNA molecules include, without limitation, miRNA, shRNA, siRNA, antisense RNA, gRNA, antagomirs, miRNA sponges, RNA aptazymes, RNA aptamers, mRNA, lncRNAs, ribozymes, and synthetic RNAs known in the art.

[0179] In certain embodiments, the transgene encodes one or more polypeptides, or a fragment thereof. Such transgenes can comprise the complete coding sequence of a polypeptide, or only a fragment of a coding sequence of a polypeptide. In certain embodiments, the transgene encodes a polypeptide that is useful to treat a disease or disorder in a subject. Suitable polypeptides include, without limitation, β-globin, hemoglobin, tissue plasminogen activator, and coagulation factors; colony stimulating factors (CSF); interleukins, such as IL-1, IL-2, IL-3, IL-4, IL-5, IL-6, IL-7, IL-8, IL-9, etc.; growth factors, such as keratinocyte growth factor (KGF), stem cell factor (SCF), fibroblast growth factor (FGF, such as basic FGF and acidic FGF), hepatocyte growth factor (HGF), insulin-like growth factors (IGFs), bone morphogenetic protein (BMP), epidermal growth factor (EGF), growth differentiation factor-9 (GDF-9), hepatoma derived growth factor (HDGF), myostatin (GDF-8), nerve growth factor (NGF), neurotrophins, platelet-derived growth factor (PDGF), thrombopoietin (TPO), transforming growth factor alpha (TGF-a), transforming growth factor beta (TGF-β), and the like; soluble receptors, such as soluble TNF-a receptors, soluble interleukin receptors (e.g., soluble IL-1 receptors and soluble type II IL-1 receptors), soluble γ/Δ T cell receptors, ligand-binding fragments of a soluble receptor, and the like; enzymes, such as a-glucosidase, imiglucerase, β-glucocerebrosidase, and alglucerase; enzyme activators, such as tissue plasminogen activator; chemokines, such as IP-10, monokine induced by interferon-gamma (Mig), Groα/IL-8, RANTES, MIP-1a, MIP-10, MCP-1, PF-4, and the like; angiogenic agents, such as vascular endothelial growth factors (VEGFs, e.g., VEGF121, VEGF165, VEGF-C, VEGF-2), glioma-derived growth factor, angiogenin, angiogenin-2, and the like; anti-angiogenic agents, such as a soluble VEGF receptor; protein vaccine; neuroactive peptides, such as nerve growth factor (NGF), bradykinin, cholecystokinin, gastrin, secretin, oxytocin, gonadotropin-releasing hormone, beta-endorphin, enkephalin, substance P, somatostatin, prolactin, galanin, growth hormone-releasing hormone, bombesin, dynorphin, warfarin, neurotensin, motilin, thyrotropin, neuropeptide Y, luteinizing hormone, calcitonin, insulin, glucagons, vasopressin, angiotensin II, thyrotropin-releasing hormone, vasoactive intestinal peptide, a sleep peptide, and the like; thrombolytic agents; atrial natriuretic peptide; relaxin; glial fibrillary acidic protein; follicle stimulating hormone (FSH); human alpha-1 antitrypsin; leukemia inhibitory factor (LIF); tissue factors; macrophage activating factors; tumor necrosis factor (TNF); neutrophil chemotactic factor (NCF); tissue inhibitors of metalloproteinases; vasoactive intestinal peptide; angiogenin; angiotrofin; fibrin; hirudin; IL-1 receptor antagonists; ciliary neurotrophic factor (CNTF); brain-derived neurotrophic factor (BDNF); neurotrophins 3 and 4/5 (NT-3 and -4/5); glial cell derived neurotrophic factor (GDNF); aromatic amino acid decarboxylase (AADC); Factor VIII, Factor IX, Factor X; dystrophin or mini-dystrophin; lysosomal acid lipase; phenylalanine hydroxylase (PAH); glycogen storage disease-related enzymes, such as glucose-6-phosphatase, acid maltase, glycogen debranching enzyme, muscle glycogen phosphorylase, liver glycogen phosphorylase, muscle phosphofructokinase, phosphorylase kinase, glucose transporter, aldolase A, β-enolase, glycogen synthase; lysosomal enzymes, such as iduronate-2-sulfatase (12S), and arylsulfatase A; and mitochondrial proteins, such as frataxin.

[0180] In certain embodiments, the transgene encodes a protein that may be defective in one or more lysosomal storage diseases. Suitable proteins include, without limitation, α-sialidase, cathepsin A, α-mannosidase, β-mannosidase, glycosylasparaginase, α-fucosidase, α-N-acetylglucosaminidase, β-galactosidase, β-hexosaminidase α-subunit, β-hexosaminidase β-subunit, GM2 activator protein, glucocerebrosidase, Saposin C, Arylsulfatase A, Saposin B, formyl-glycine generating enzyme, β-galactosylceramidase, α-galactosidase A, iduronate sulfatase, α-iduronidase, heparan N-sulfatase, acetyl-CoA transferase, N-acetyl glucosaminidase, β-glucuronidase, N-acetyl glucosamine 6-sulfatase, N-acetylgalactosamine 4-sulfatase, galactose 6-sulfatase, hyaluronidase, α-glucosidase, acid sphingomyelinase, acid ceramidase, acid lipase, capthepsin K, tripeptidyl peptidase, palmitoyl-protein thioesterase, cystinosin, sialin, UDP-N-acetylglucosamine, phosphotransferase γ-subunit, mucolipin-1, LAMP-2, NPC1, CLN3, CLN 6, CLN 8, LYST, MYOV, RAB27A, melanophilin, and AP3 β-subunit.

[0181] In certain embodiments, the transgene encodes an antibody or a fragment thereof (e.g., a Fab, scFv, or full-length antibody). Suitable antibodies include, without limitation, muromonab-cd3, efalizumab, tositumomab, daclizumab, nebacumab, catumaxomab, edrecolomab, abciximab, rituximab, basiliximab, palivizumab, infliximab, trastuzumab, adalimumab, ibritumomab tiuxetan, omalizumab, cetuximab, bevacizumab, natalizumab, panitumumab, ranibizumab, eculizumab, certolizumab, ustekinumab, canakinumab, golimumab, ofatumumab, tocilizumab, denosumab, belimumab, ipilimumab, brentuximab vedotin, pertuzumab, raxibacumab, obinutuzumab, alemtuzumab, siltuximab, ramucirumab, vedolizumab, blinatumomab, nivolumab, pembrolizumab, idarucizumab, necitumumab, dinutuximab, secukinumab, mepolizumab, alirocumab, evolocumab, daratumumab, elotuzumab, ixekizumab, reslizumab, olaratumab, bezlotoxumab, atezolizumab, obiltoxaximab, inotuzumab ozogamicin, brodalumab, guselkumab, dupilumab, sarilumab, avelumab, ocrelizumab, emicizumab, benralizumab, gemtuzumab ozogamicin, durvalumab, burosumab, erenumab, galcanezumab, lanadelumab, mogamulizumab, tildrakizumab, cemiplimab, fremanezumab, ravulizumab, emapalumab, ibalizumab, moxetumomab, caplacizumab, romosozumab, risankizumab, polatuzumab, eptinezumab, leronlimab, sacituzumab, brolucizumab, isatuximab, and teprotumumab.

[0182] In certain embodiments, the transgene encodes a nuclease. Suitable nucleases include, without limitation, zinc fingers nucleases (ZFN) (see, e.g., Porteus, and Baltimore (2003) Science 300: 763; Miller et al. (2007) Nat. Biotechnol. 25: 778-785; Sander et al. (2011) Nature Methods 8: 67-69; and Wood et al. (2011) Science 333: 307, each of which is hereby incorporated by reference in its entirety); transcription activator-like effectors nucleases (TALEN) (see, e.g., Wood et al. (2011) Science 333: 307; Boch et al. (2009) Science 326: 1509-1512; Moscou and Bogdanove (2009) Science 326: 1501; Christian et al. (2010) Genetics 186: 757-761; Miller et al. (2011) Nat. Biotechnol. 29: 143-148; Zhang et al. (2011) Nat. Biotechnol. 29: 149-153; and Reyon et al. (2012) Nat. Biotechnol. 30(5): 460-465, each of which is hereby incorporated by reference in its entirety); homing endonucleases; meganucleases (see, e.g., U.S. Patent Publication No. US 2014/0121115, which is hereby incorporated by reference in its entirety); and RNA-guided nucleases (see, e.g., Makarova et al. (2018) The CRISPR Journal 1(5): 325-336; and Adli (2018) Nat. Communications 9: 1911, each of which is hereby incorporated by reference in its entirety).

[0183] In certain embodiments, the transgene encodes an RNA-guided nuclease. Suitable RNA-guided nucleases include, without limitation, Class I and Class II clustered regularly interspaced short palindromic repeats (CRISPR)-associated nucleases. Class I is divided into types I, III, and IV, and includes, without limitation, type I (Cas3), type I-A (Cas8a, Cas5), type I-B (Cas8b), type I-C(Cas8c), type I-D (Cas10d), type I-E (Cse1, Cse2), type I-F (Csy1, Csy2, Csy3), type I-U (GSU0054), type III (Cas10), type III-A (Csm2), type III-B (Cmr5), type III-C(Csx10 or Csx11), type III-D (Csx10), and type IV (Csf1). Class II is divided into types II, V, and VI, and includes, without limitation, type II (Cas9), type II-A (Csn2), type II-B (Cas4), type V (Cpf1, C2c1, C2c3), and type VI (Cas13a, Cas13b, Cas13c). RNA-guided nucleases also include naturally-occurring Class II CRISPR nucleases such as Cas9 (Type II) or Cas12a/Cpf1 (Type V), as well as other nucleases derived or obtained therefrom. Exemplary Cas9 nucleases that may be used in the present invention include, but are not limited to, S. pyogenes Cas9 (SpCas9), S. aureus Cas9 (SaCas9), N. meningitidis Cas9 (NmCas9), C. jejuni Cas9 (CjCas9), and Geobacillus Cas9 (GeoCas9).

[0184] In certain embodiments, the transgene encodes reporter sequences, which upon expression produce a detectable signal. Such reporter sequences include, without limitation, DNA sequences encoding β-lactamase, β-galactosidase (LacZ), alkaline phosphatase, thymidine kinase, green fluorescent protein (GFP), red fluorescent protein (RFP), chloramphenicol acetyltransferase (CAT), luciferase, membrane bound proteins including, for example, CD2, CD4, CD8, the influenza hemagglutinin protein, and others well known in the art, to which high affinity antibodies directed thereto exist or can be produced by conventional means, and fusion proteins comprising a membrane bound protein appropriately fused to an antigen tag domain from, among others, hemagglutinin or Myc.

[0185] In certain embodiments, the rAAV genome comprises a TRE operably linked to the transgene, to control expression of an RNA or polypeptide encoded by the transgene. In certain embodiments, the TRE comprises a constitutive promoter. In certain embodiments, the TRE can be active in any mammalian cell (e.g., any human cell). In certain embodiments, the TRE is active in a broad range of human cells. Such TREs may comprise constitutive promoter and/or enhancer elements, including any of those described herein, and any of those known to one of skill in the art. In certain embodiments, the TRE comprises an inducible promoter. In certain embodiments, the TRE may be a tissue-specific TRE, i.e., it is active in specific tissue(s) and/or organ(s). A tissue-specific TRE comprises one or more tissue-specific promoter and/or enhancer elements, and optionally one or more constitutive promoter and/or enhancer elements. A skilled artisan would appreciate that tissue-specific promoter and/or enhancer elements can be isolated from genes specifically expressed in the tissue by methods well known in the art.

[0186] Suitable promoters include, e.g., cytomegalovirus promoter (CMV) (Stinski et al. (1985) Journal of Virology 55(2): 431-441); CMV early enhancer/chicken β-actin (CBA) promoter/rabbit β-globin intron (CAG) (Miyazaki et al. (1989) Gene 79(2): 269-277); CB^{SB} (Jacobson et al. (2006) Molecular Therapy 13(6): 1074-1084); human elongation factor 1α promoter (EF1α) (Kim et al. (1990) Gene 91 (2): 217-223); human phosphoglycerate kinase promoter (PGK) (Singer-Sam et al. (1984) Gene 32(3): 409-417); mitochondrial heavy-strand promoter (Lodeiro et al. (2012) PNAS 109(17): 6513-6518); and ubiquitin promoter (Wulff et al. (1990) FEBS Letters 261: 101-105). In certain embodiments, the TRE comprises a cytomegalovirus (CMV) promoter/enhancer (e.g., comprising a nucleotide sequence at least 90%, 91%, 92%, 93%, 94%, 95%, 96%, 97%, 98%, 99%, or 100% identical to SEQ ID NO: 412 or 413), an SV40 promoter, a chicken beta actin (CBA) promoter (e.g., comprising a nucleotide sequence at least 90%, 91%, 92%, 93%, 94%, 95%, 96%, 97%, 98%, 99%, or 100% identical to SEQ ID NO: 414 or 415), an smCBA promoter (e.g., comprising a nucleotide sequence at least 90%, 91%, 92%, 93%, 94%, 95%, 96%, 97%, 98%, 99%, or 100% identical to SEQ ID NO: 416), a human elongation factor 1 alpha (EF1α) promoter (e.g., comprising a nucleotide sequence at least 90%, 91%, 92%, 93%, 94%, 95%, 96%, 97%, 98%, 99%, or 100% identical to SEQ ID NO: 417), a minute virus of mouse (MVM) intron which comprises transcription factor binding sites (e.g., comprising a nucleotide sequence at least 90%, 91%, 92%, 93%, 94%, 95%, 96%, 97%, 98%, 99%, or 100% identical to SEQ ID NO: 418 or 419), a human phosphoglycerate kinase (PGK1) promoter, a human ubiquitin C (Ubc) promoter, a human beta actin promoter, a human neuron-specific enolase (ENO2) promoter, a human beta-glucuronidase (GUSB) promoter, a rabbit beta-globin element (e.g., comprising a nucleotide sequence at least 90%, 91%, 92%, 93%, 94%, 95%, 96%, 97%, 98%, 99%, or 100% identical to SEQ ID NO: 420 or 421), a human calmodulin 1 (CALM1) promoter (e.g., comprising a nucleotide sequence at least 90%, 91%, 92%, 93%, 94%, 95%, 96%, 97%, 98%, 99%, or 100% identical to SEQ ID NO: 422), a human ApoE/C-I hepatic control region (HCR1) (e.g., comprising a nucleotide sequence at least 90%, 91%, 92%, 93%, 94%, 95%, 96%, 97%, 98%, 99%, or 100% identical to SEQ ID NO: 423), a human al-antitrypsin (hAAT) promoter (e.g., comprising a nucleotide sequence at least 90%, 91%, 92%, 93%, 94%, 95%, 96%, 97%, 98%, 99%, or 100% identical to SEQ ID NO: 424, 425, or 426), an extended HCR1 (e.g., comprising a nucleotide sequence at least 90%, 91%, 92%, 93%, 94%, 95%, 96%, 97%, 98%, 99%, or 100% identical to SEQ ID NO: 431), a HS-CRM8 element of an hAAT promoter (e.g., comprising a nucleotide sequence at least 90%, 91%, 92%, 93%, 94%, 95%, 96%, 97%, 98%, 99%, or 100% identical to SEQ ID NO: 432), a human transthyretin (TTR) promoter (e.g., comprising a nucleotide sequence at least 90%, 91%, 92%, 93%, 94%, 95%, 96%, 97%, 98%, 99%, or 100% identical to SEQ ID NO: 427), and/or a human Methyl-CpG Binding Protein 2 (MeCP2) promoter. Any of the TREs described herein can be combined in any order to drive efficient transcription. For example, a transfer genome may comprise a TRE comprising a CMV enhancer, a CBA promoter, and the splice acceptor from exon 3 of the rabbit beta-globin gene, collectively called a CAG promoter (e.g., comprising a nucleotide sequence at least 90%, 91%, 92%, 93%, 94%, 95%, 96%, 97%, 98%, 99%, or 100% identical to SEQ ID NO: 428). For example, a transfer genome may comprise a TRE comprising a hybrid of CMV enhancer and CBA promoter followed by a splice donor and splice acceptor, collectively called a CASI promoter region (e.g., comprising a nucleotide sequence at least 90%, 91%, 92%, 93%, 94%, 95%, 96%, 97%, 98%, 99%, or 100% identical to SEQ ID NO: 429). For example, a transfer genome may comprise a TRE comprising a HCR1 and hAAT promoter (also referred to as an LP1 promoter, e.g., comprising a nucleotide sequence at least 90%, 91%, 92%, 93%, 94%, 95%, 96%, 97%, 98%, 99%, or 100% identical to SEQ ID NO: 430).

[0187] In certain embodiments, the TRE is brain-specific (e.g., neuron-specific, glial cell-specific, astrocyte-specific, oligodendrocyte-specific, microglia-specific and/or central nervous system-specific). Exemplary brain-specific TREs may comprise one or more elements from, without limitation, human glial fibrillary acidic protein (GFAP) promoter, human synapsin 1 (SYN1) promoter, human synapsin 2 (SYN2) promoter, human metallothionein 3 (MT3) promoter, and/or human proteolipid protein 1 (PLP1) promoter. More brain-specific promoter elements are disclosed in WO 2016/100575A1, which is incorporated by reference herein in its entirety.

[0188] In certain embodiments, the native promoter for the transgene may be used. The native promoter may be preferred when it is desired that expression of the transgene should mimic the native expression. The native promoter may be used when expression of the transgene must be regulated temporally or developmentally, or in a tissue-specific manner, or in response to specific transcriptional stimuli. In a further embodiment, other native expression control elements, such as enhancer elements, polyadenylation sites or Kozak consensus sequences may also be used to mimic the native expression.

[0189] In certain embodiments, the rAAV genome comprises an editing genome. Editing genomes can be used to edit the genome of a cell by homologous recombination of the editing genome with a genomic region surrounding a target locus in the cell. In certain embodiments, the editing genome is designed to correct a genetic defect in a gene by homologous recombination. Suitable target genes for editing using an editing genome include, without limitation, phenylalanine hydroxylase (PAH), cystic fibrosis conductance transmembrane regulator (CFTR), beta hemoglobin (HBB), oculocutaneous albinism II (OCA2), Huntingtin (HTT), dystrophia myotonica-protein kinase (DMPK), low-density lipoprotein receptor (LDLR), apolipoprotein B (APOB), neurofibromin 1 (NF1), polycystic kidney disease 1 (PKD1), polycystic kidney disease 2 (PKD2), coagulation factor VIII (F8), dystrophin (DMD), phosphate-regulating endopeptidase homologue, X-linked (PHEX), methyl-CpG-binding protein 2 (MECP2), and ubiquitin-specific peptidase 9Y, Y-linked (USP9Y).

[0190] In another aspect, the instant disclosure provides pharmaceutical compositions comprising an AAV as disclosed herein together with a pharmaceutically acceptable excipient, adjuvant, diluent, vehicle or carrier, or a combination thereof. A “pharmaceutically acceptable carrier” includes any material which, when combined with an active ingredient of a composition, allows the ingredient to retain biological activity and without causing disruptive physiological reactions, such as an unintended immune reaction. Pharmaceutically acceptable carriers include water, phosphate buffered saline, emulsions such as oil/water emulsion, and wetting agents. Compositions comprising such carriers are formulated by well-known conventional methods such as those set forth in Remington's Pharmaceutical Sciences, current ed., Mack Publishing Co., Easton Pa. 18042, USA; A. Gennaro (2000) “Remington: The Science and Practice of Pharmacy,” 20th edition, Lippincott, Williams, & Wilkins; Pharmaceutical Dosage Forms and Drug Delivery Systems (1999) H. C. Ansel et al., 7th ed., Lippincott, Williams, & Wilkins; and Handbook of Pharmaceutical Excipients (2000) A. H. Kibbe et al., 3rd ed. Amer. Pharmaceutical Assoc.

### V. METHODS OF USE

[0191] In another aspect, the instant disclosure provides methods for transducing a cell. The methods generally comprise contacting the cell with an rAAV disclosed herein under conditions whereby the cell is transduced.

[0192] The rAAV disclosed herein can comprise a transgene under the control of a TRE. Accordingly, in certain embodiments, the instant disclosure provides methods for expressing a transgene in a cell, the method generally comprising contacting the cell with such an rAAV under conditions whereby the cell is transduced and the transgene is expressed. The transgene can encode a polypeptide and/or an RNA molecule, as described herein. Accordingly, in certain embodiments, the instant disclosure provides methods for producing a polypeptide and/or an RNA molecule in a cell, the method generally comprising contacting the cell with such an rAAV under conditions whereby the cell is transduced and the polypeptide and/or an RNA molecule is produced.

[0193] The rAAV disclosed herein can comprise an editing genome. rAAV comprising editing genomes can be used to edit the genome of a cell by homologous recombination of the editing genome with a homologous target locus in the cell. Accordingly, in certain embodiments, the instant disclosure provides a method for editing a target locus in a genome of a cell, the method generally comprising contacting the cell with such an rAAV under conditions whereby the cell is transduced and the target locus is edited.

[0194] The rAAV disclosed herein can be used to transduce cells in vitro, in vivo, and ex vivo.

[0195] The rAAV disclosed herein can be administered to a subject (e.g., a human subject) by all routes suitable for an rAAV, including, without limitation, intravenously, intraperitoneally, subcutaneously, intramuscularly, intrathecally, or intradermally.

[0196] In another aspect, the invention provides an rAAV as disclosed herein for use in medicine. In another aspect, the invention provides an rAAV as disclosed herein for use as therapy. In another aspect, the invention provides an rAAV as disclosed herein for use as a medicament.

### VI. ADENO-ASSOCIATED VIRUS PACKAGING SYSTEMS

[0197] In another aspect, the instant disclosure provides packaging systems for recombinant preparation of a recombinant adeno-associated virus (rAAV) disclosed herein. Such packaging systems generally comprise: first nucleotide encoding one or more AAV Rep proteins; a second nucleotide encoding a capsid protein of any of the AAVs as disclosed herein; and a third nucleotide sequence comprising any of the rAAV genome sequences as disclosed herein, wherein the packaging system is operative in a cell for enclosing the transfer genome in the capsid to form the AAV.

[0198] In certain embodiments, the packaging system comprises a first vector comprising the first nucleotide sequence encoding the one or more AAV Rep proteins and the second nucleotide sequence encoding the AAV capsid protein, and a second vector comprising the third nucleotide sequence comprising the rAAV genome. As used in the context of a packaging system as described herein, a “vector” refers to a nucleic acid molecule that is a vehicle for introducing nucleic acids into a cell (e.g., a plasmid, a virus, a cosmid, an artificial chromosome, etc.). In certain embodiments of the packaging system, the packaging system further comprises a fourth nucleotide sequence comprising one or more helper virus genes. In certain embodiments, the fourth nucleotide sequence comprises adenoviral E2, E4, and VA genes. In certain embodiments of the packaging system, the packaging system further comprises a third vector (e.g., a helper virus vector), comprising the fourth nucleotide sequence. The third vector may be an independent third vector, integral with the first vector, or integral with the second vector.

[0199] In certain embodiments, the packaging system comprises a first vector comprising the first nucleotide sequence encoding one or more AAV Rep proteins, the second nucleotide sequence encoding a capsid protein of any of the AAVs as disclosed herein, and the third nucleotide sequence comprising any of the rAAV genome sequences as disclosed herein, wherein the packaging system is operative in a cell for enclosing the transfer genome in the capsid to form the AAV. In certain embodiments of the packaging system, the packaging system further comprises a fourth nucleotide sequence comprising one or more helper virus genes. In certain embodiments, the fourth nucleotide sequence comprises adenoviral E2, E4, and VA genes. In certain embodiments of the packaging system, the packaging system further comprises a second vector (e.g., a helper virus vector), comprising the fourth nucleotide sequence. The second vector may be an independent second vector, integral with the first vector.

[0200] Any AAV Rep protein can be employed in the packaging systems disclosed herein. In certain embodiments of the packaging system, the Rep nucleotide sequence encodes an AAV2 Rep protein. Suitable AAV2 Rep proteins may include, without limitation, Rep 78/68 or Rep 68/52. In certain embodiments of the packaging system, the nucleotide sequence encoding the AAV2 Rep protein comprises a nucleotide sequence that encodes a protein having a minimum percent sequence identity to the AAV2 Rep amino acid sequence of SEQ ID NO: 433, wherein the minimum percent sequence identity is at least 70% (e.g., at least 75%, at least 80%, at least 85%, at least 90%, at least 95%, at least 98%, at least 99%, or 100%) across the length of the amino acid sequence of the AAV2 Rep protein. In certain embodiments of the packaging system, the AAV2 Rep protein has the amino acid sequence set forth in SEQ ID NO: 433.

[0201] In certain embodiments of the packaging system, the helper virus is selected from the group consisting of adenovirus, herpes virus (including herpes simplex virus (HSV)), poxvirus (such as vaccinia virus), cytomegalovirus (CMV), and baculovirus. In certain embodiments of the packaging system, where the helper virus is adenovirus, the adenovirus genome comprises one or more adenovirus RNA genes selected from the group consisting of E1, E2, E4, and VA. In certain embodiments of the packaging system, where the helper virus is adenovirus, the adenovirus genome comprises one or more adenovirus RNA genes selected from the group consisting of E2, E4, and VA. In certain embodiments of the packaging system, where the helper virus is HSV, the HSV genome comprises one or more of HSV genes selected from the group consisting of UL5/8/52, ICPO, ICP4, ICP22, and UL30/UL42.

[0202] In certain embodiments of the packaging system, the vectors (e.g., first, second, and/or third vectors) are contained within one or more plasmids.

[0203] In certain embodiments of the packaging system, the first, second, and/or third vectors are contained within one or more recombinant helper viruses. In certain embodiments, the first vector and the third vector are contained within a recombinant helper virus. In certain embodiments, the second vector and the third vector are contained within a recombinant helper virus.

[0204] In a further aspect, the disclosure provides a method for recombinant preparation of an AAV as described herein, wherein the method comprises transfecting or transducing a cell with a packaging system as described herein under conditions operative for enclosing the rAAV genome in the capsid to form the rAAV as described herein. Exemplary methods for recombinant preparation of an rAAV include transient transfection (e.g., with one or more transfection plasmids containing a first, and a second, and optionally a third vector as described herein), viral infection (e.g., with one or more recombinant helper viruses, such as a adenovirus, poxvirus (such as vaccinia virus), herpes virus (including HSV, cytomegalovirus, or baculovirus, containing a first, and a second, and optionally a third vector as described herein)), and stable producer cell line transfection or infection (e.g., with a stable producer cell, such as a mammalian or insect cell, containing a Rep nucleotide sequence encoding one or more AAV Rep proteins and/or a Cap nucleotide sequence encoding one or more capsid proteins as described herein, and with a transfer genome as described herein being delivered in the form of a plasmid or a recombinant helper virus).

[0205] Accordingly, the instant disclosure provides a packaging system for preparation of an rAAV, wherein the packaging system comprises: a first nucleotide sequence encoding one or more AAV Rep proteins; a second nucleotide sequence encoding a capsid protein of any one of the AAVs described herein; a third nucleotide sequence comprising an rAAV genome sequence of any one of the AAVs described herein; and optionally a fourth nucleotide sequence comprising one or more helper virus genes (e.g., adenoviral E2, E4, and VA genes).

### VII. EXAMPLES

[0206] The following examples are offered by way of illustration, and not by way of limitation.

### Materials and Methods

### Culturing of Cell Lines.

[0207] CHO glycan mutants, Pro5, Lec2, Lec1, and Lec8 cells, were cultured in minimum essential medium alpha (MEM a) with nucleosides (ThermoFisher Scientific, Waltham, MA) and supplemented with 10% FBS (ThermoFisher Scientific, Waltham, MA) and 1% Penicillin-Streptomycin (ThermoFisher Scientific, Waltham, MA).

rAAV Production, Purification, and Titration.

[0208] For vectors used in vitro studies, recombinant AAVs were packaged in different AAV and AAVHSC capsids with self-complementary CBA-eGFP (abbreviated hereafter as scCBA.eGFP), containing the chicken beta actin promoter, CMV enhancer, eGFP, and simian virus 40 (SV40) late polyA. Vectors in FIGS. 2B-2D were packaged and prepared by triple-plasmid transient transfection in human embryonic kidney (HEK)293 cells using calcium phosphate and purified through two rounds of cesium chloride (CsCl) density gradient ultracentrifugation (SABTech, Inc., Philadelphia, PA). All AAV vectors were formulated in PBS-based buffer. Vector titers were determined by quantitative PCR (qPCR) using primers and probes specific for eGFP.

[0209] All remaining vectors used in in vitro and in vivo studies were manufactured by triple transfection of HEK293 cells with a plasmid containing the payload of interest containing AAV2 ITRs, a second plasmid containing the capsid sequence and AAV2 Rep gene, and a third plasmid containing adenovirus helper genes. At 72 hours post-transfection, cells were separated from supernatant by centrifugation and lysed for 1 hour in a buffer containing Tris-HCl, sodium-chloride (NaCl), Triton X-100, magnesium chloride (MgCl2), and benzonase. Cell debris was clarified by centrifugation and purified using an AAV9 affinity resin. Vectors were enriched for full capsids by cesium ultracentrifugation and buffer exchanged and formulated in DPBS-based buffer. Vectors were titrated by quantitative PCR using primers targeting the SV40 region. All vectors were analyzed by silver and Coomassie Blue-stained sodium dodecyl-sulfate polyacrylamide gel electrophoresis (SDS-PAGE) for VP1, 2, and 3 ratios, endotoxin (<10 EU/mL) and capsid content by enzyme-linked immunoassay (ELISA). All AAVHSC and altered AAVHSC capsids were able to yield acceptable titers when produced using the same process (Table 1).

TABLE 1
Titers of AAVHSC and AAVHSC Variants

| AAVHSC Serotype | Titer (VG/mL) |
|---|---|
| AAVHSC7 | 1.25E+13 |
| AAVHSC7 F501I | 4.21E+13 |
| AAVHSC15 | 3.64E+13* |
| AAVHSC15 F501I | 4.56E+13 |
| AAVHSC15 Y706C | 1.75E+13 |
| AAVHSC16 | 3.33E+13 |
| AAVHSC16 I501F | 2.83E+13 |
| AAVHSC16 Y706C | 4.56E+13 |
| AAVHSC16 T346A | 3.17E+13 |
| AAVHSC16 I501L | 2.00E+13 |
| AAVHSC16 I501T | 1.30E+13 |
| AAVHSC16 I501V | 1.20E+13 |
| AAVHSC16 I501W | 1.32E+13 |
| AAVHSC16 I501YA | 9.16E+12 |
| AAVHSC16 I501YB | 1.44E+13 |
| AAVHSC7 G505R | 4.56E+13 |
| AAVHSC8 | 1.03E+13 |
| AAVHSC8 G505R | 4.39E+13 |

*average of three separate productions.

### Mutagenesis of AAVHSCs.

[0210] Mutagenic oligonucleotides were synthesized to induce single nucleotide changes (Integrated DNA Technologies, Coralville, IA). Mutations were introduced onto the wt AAVHSC7, AAVHSC15, and AAVHSC16 capsids using the QuikChange Lightning Site-Directed Mutagenesis Kit (Agilent Technologies, Santa Clara, CA) according to the manufacturer's specifications. The mutagenized plasmid was then transformed into DH5α Turbo Competent Escherichia coli (New England Biolabs, Ipswich, MA) and colonies screened by DNA sequencing (Eton Biosciences, Charlestown, MA).

### CHO Cell Surface Binding Assay.

[0211] Cells were counted and resuspended in growth media at a density of 1-2×10⁶ cells/mL and plated in pre-chilled 96-well tissue culture plates and then incubated on ice for 15 minutes prior to transduction. Cells were then transduced on ice by adding the scCBA.eGFP vectors directly to cell culture media at the indicated MOL. 1 hour following transduction, cells were washed 3 times in 4° C. PBS. After the final wash, half of the cells were resuspended in 100 μL PBS for subsequent DNA extraction using the In-Plate Cell Lysis and DNA Extraction Method. The remaining half of the cells were resuspended in media and cultured at 37° C. for 24 hours.

### Transduction Assay in Primary Human Hepatocytes.

[0212] Frozen primary human hepatocytes were plated at 2×10⁵ cells/well in a collagen coated 48-well plate. At 6 hours following plating, culture medium was replaced with fresh medium and cells were transduced with scCBA.eGFP vectors at increasing MOIs of 1.5×10⁵, 3×10⁵, and 6×10⁵. After 48 hours post-transduction, culture medium was replaced. Fluorescent microscopy was used to detect eGFP expression at day four post-transduction.

### Flow Cytometric Analysis.

[0213] In vitro eGFP expression was measured at 24 hours post AAV scCBA.eGFP transduction by flow cytometric analysis on either the SONY SH800 (Sony Biotechnology) or the CytoFLEX S (Beckman Coulter Inc., Brea, California). Briefly, cells were washed once with PBS and adherent CHO cells were dissociated using TrypLE Reagent (ThermoFisher Scientific, Waltham, MA). Cells were then stained to determine viability using LIVE/DEAD™ Fixable Violet Dead Cell Stain (ThermoFisher Scientific, Waltham, MA) for 10 minutes at room temperature in PBS. Cells were washed and then resuspended in FACS buffer (2% fetal bovine serum in PBS) or Cell Staining buffer (BioLegend, San Diego, CA). A minimum of 1×10⁴ cells were collected for each sample. The total number of cells and level of terminally exposed cell membrane galactose was determined using Lectin Peanut Agglutinin (PNA) (Item No. L32460, ThermoFisher Scientific, Waltham, MA) from Arachis hypogaea (peanut), conjugated with Alexa Fluor 647. Cells were stained using a 1:1000 dilution, incubated for 1 hour and then washed twice with PBS prior to flow cytometry analysis.

DNA Isolation from Cells.

[0214] Direct quantification of DNA from lysed cells was performed through an in-plate lysis protocol. Briefly, to each 100 μL cell suspension sample, 85 μL of extraction solution (0.25% deoxycholate, 0.45% Tween/HEPES solution (25% Tween-20, 0.5M HEPES), 1 mM Tris HCl, 1 mM EDTA, 0.1% sodium dodecyl sulfate, 0.3 mg/mL Proteinase K) (ThermoFisher Scientific, Waltham, MA) was added. Samples were then mixed by pipetting and sealed with an adhesive plate film. The plate was then transferred to a thermocycler and incubated at 37° C. for 1 hour, 55° C. for 2 hours, and 95° C. for 30 minutes (to inactivate the Proteinase K). For subsequent qPCR analysis, 10 μL of digestion per sample was diluted in 100 μL of Ultrapure water (ThermoFisher Scientific, Waltham, MA).

### Quantitation of VGs in Transduced Cells.

[0215] The ratio of AAV vgs per cell or allele was determined by quantitative real-time PCR (qPCR) of DNA isolated from cells. Analysis was performed on the QuantStudio 3 Real-Time PCR System (Applied Biosystems, ThermoFisher Scientific, Waltham, MA). VG detection was using TaqMan™ Universal PCR Master Mix (ThermoFisher Scientific, Waltham, MA) and the primers and probes set forth in Table 2 (Integrated DNA Technologies, Coralville, IA):

TABLE 2
Primers and Probes for ddPCR

| | | | SEQ |
|---|---|---|---|
| | | | ID |
| | | Sequence | NO: |
| eGFP | Forward | 5′-CTGCTGCCCGACAACCA-3′ | 434 |
| #1 | Reverse | 5′-GACCATGTGATCGCGCTTCT-3′ | 435 |
| | Probe | 5′-TACCTGAGCACCCAGTCCGCCCT-3′ | 436 |
| Human | Forward | 5′-TGAAGGTGGAGGACATTCCTCTA-3′ | 437 |
| ApoB | Reverse | 5′-CTGGAATTGCGATTTCTGGTAA-3′ | 438 |
| | Probe | 5′-CGAGAATCACCCTGCCAGACTTCCGT-3′ | 439 |
| CHO | Forward | 5′-CCATGTACGTAGCCATTCAGG-3′ | 440 |
| Actin | Reverse | 5′-CATGAGGGAGAGCGTAGCC-3′ | 441 |
| Beta | Probe | 5′-TGTCCCTGTATGCCTCTGGTCGTA-3′ | 442 |

### Animal Procedures for Mice.

[0216] Housing and all experimental procedures were in accordance with the Institutional Animal Care and Use Committee (IACUC). B6(Cg)-Tyrc-2J/J (B6 albino) mice (obtained from Jackson Laboratories, Bar Harbor, ME, USA) and CD1 mice (obtained from Charles River Laboratory, Wilmington, MA), were maintained in the animal facility under standard laboratory conditions (temperature 20-24° C., relative humidity 50-60%, 12 hour light/12 hour dark cycle). Mice were supplied with standard chow (Item No. PicoLab 5058, LabDiet, St. Louis, MO) and sterile water ad libitum. Male B6 albino mice at 7-weeks of age and male and female CD1 mice at 4-weeks of age were administered vectors or vehicle by IV injection using a 1 mL syringe with 28-gauge needle. Imaging of dosed B6 albino mice was performed at 6 weeks post-injection, XenoLight D-luciferin-K+ Salt Bioluminescent Substrate (Item No. 122799, PerkinElmer, Waltham, MA) was administered via intraperitoneal injection (IP; 15 mg/mL in DPBS −/− Ca²⁺Mg²⁺, 150 mg/kg of body weight). Luciferase transgene expression was imaged using the IVIS Lumina LT Series III pre-clinical in vivo imaging system (PerkinElmer, Waltham, MA) and whole body and tissue-specific luminescence quantitated using Living Image (PerkinElmer, Waltham, MA) software. Tissues from dosed CD1 mice were analyzed by eGFP immunohistochemistry.

### Animal Procedures for NHP.

[0217] Housing and all procedures were in accordance with the IACUC. All breeding, housing, and procedures were performed on cynomolgus macaques (Macaca fascicularis) as previously described (see, Ellsworth et al., PLoS One (2019) 14(11):e0225582). Sera from all animals were prescreened for anti-AAVHSC neutralizing antibodies using the Huh-7 cell-based assay (Horae Gene Therapy Center, University of Massachusetts, Worchester, MA) over a range of serum dilutions from 1/10 to 1/1250. Only antibody negative animals were used in this work. Each subject was anesthetized (young males, 4-5 months old) with an intramuscular injection (IM) of ketamine (10 mg/kg). Each animal was fitted with a saphenous vein catheter for IV injection of AAVHSCs. Blood samples were collected from the femoral vein for assessment of clinical chemistries, CBCs, and neutralizing antibodies at baseline. AAVHSCs were infused at 7-8 mL/kg through a saphenous vein catheter over 1.0 minute using all-plastic syringes. Each animal was allowed to recover in a warmed incubator following injection and, when fully awake was returned to the cage with its mother. At 2 weeks post-dosing, all subjects were anesthetized with ketamine, heparinized (5,000 units, given 5-10 minute prior to sacrifice) and euthanized with an overdose of IV sodium pentobarbital (80-100 mg/kg). ALT and AST levels in the serum of dosed NHPs were determined at VRL Laboratories (San Antonio, Texas) using a Clinical CBC (complete blood count) and Chemistry panel.

DNA Isolation from Murine Tissues.

[0218] DNA was extracted from tissues by the Maxwell RSC (Promega, Madison, WI) using the Maxwell RSC DNA FFPE Kit (Promega, Madison, WI) and by the QIAamp® Fast DNA Tissue Kit (Qiagen, Hilden, Germany) both as described by the manufacturer with the following modifications: Approximately 50 mg of tissue was homogenized in Precellys Soft tissue homogenizing CK14 2 mL tube with the Precellys Evolution homogenizer (Bertin Instruments, Montigny-le-Bretonneux, France) for 30 seconds at 5,000 rpm. DNA was eluted in 50 μL Ultrapure water.

DNA Isolation from Fixed NHP Tissue.

[0219] Approximately 30 g portions of fixed NHP tissue were isolated using a biopsy punch. Samples were homogenized in Precellys Soft tissue homogenizing CK14 2 mL tube with the Precellys Evolution homogenizer (Bertin Instruments, Montigny-le-Bretonneux, France) for 30 seconds at 5,000 rpm. Homogenized tissue was then digested for 24 hours using Proteinase K (ThermoFisher Scientific, Waltham, MA) and DNA was isolated using the RecoverAll™ Total Nucleic Acid Isolation Kit (ThermoFisher Scientific, Waltham, MA). DNA was eluted in 50 μL Ultrapure water (New England Biolabs, Ipswich, MA).

### Quantitation of VG Biodistribution in Animal Model Tissues.

[0220] VG copies per allele were determined by digital droplet PCR (ddPCR) using ddPCR Supermix for Probes (No dUTP) (Bio-Rad Laboratories, Hercules, CA). Detection of targets in 10 ng of sample input was accomplished using the primers and probes set forth in Table 3 (Integrated DNA Technologies, Coralville, IA):

TABLE 3
Primers and Probes for ddPCR

| | | | SEQ |
|---|---|---|---|
| | | | ID |
| | | Sequence | NO: |
| eGFP | Forward | 5′-CTGCTGCCCGACAACCA-3′ | 434 |
| #1 | Reverse | 5′-GACCATGTGATCGCGCTTCT-3′ | 435 |
| | Probe | 5′-TACCTGAGCACCCAGTCCGCCCT-3′ | 436 |
| eGFP | Forward | 5′-GAACCGCATCGAGCTGAA-3′ | 443 |
| #2 | Reverse | 5′-TGCTTGTCGGCCATGATATAG-3′ | 444 |
| | Probe | 5′-ATCGACTTCAAGGAGGACGGCAAC-3′ | 445 |
| Luci- | Forward | 5′-CTCAAAGTATTCAGCATAGGTGA | 446 |
| ferase | | TGTC-3′ | |
| | Reverse | 5′-AACTGCACAAGGCCATGAAGA-3′ | 447 |
| | Probe | 5′-TTGCCTTCACTGATGCTCACATTG | 448 |
| | | AGGT-3′ | |
| Mouse | Forward | 5′-CGTGGGCTCCAGCATTCTA-3′ | 449 |
| ApoB | Reverse | 5′-TCACCAGTCATTTCTGCCTTTG-3′ | 450 |
| | Probe | 5′-CCTTGAGCAGTGCCCGACCATTG-3′ | 451 |
| NHP | Forward | 5′-TGAAGGTGGAGGACATTCCTCTA-3′ | 437 |
| ApoB | Reverse | 5′-CTGGAATTGCGATTTCTGGTAA-3′ | 438 |
| | Probe | 5′-CGAGAATCACCCTGCCAGACTT | 452 |
| | | CCAT-3′ | |

[0221] Post droplet generation, 96-well plates were sealed with an adhesive plate film, transferred to a thermocycler for cycling, and then to the QX200 Droplet Reader for analysis. Data were analyzed using QuantSoft Analysis Pro Software (Bio-Rad Laboratories, Hercules, CA).

### Histology and Microscopy.

[0222] Paraffin-embedded liver tissues were sectioned at 4-5 μM and were processed for eGFP immunohistochemistry (IHC) as previously described (see, Ellsworth et al., PLoS One (2019) 14(11):e0225582). eGFP-positive cells were stained by IHC with a rabbit anti-eGFP polyclonal antibody (Item No. ab290, Abcam, Cambridge, United Kingdom). Endogenous peroxidase was inhibited by incubation in 3% H2O2. Samples were pretreated with proteinase K, followed by a serum-free protein block (epitope retrieval). Primary antibody incubation for 30 minutes at room temperature, followed by an EnVision+ Rabbit HRP detection system (Agilent, Santa Clara, CA). eGFP was visualized with an EnVision+ Rabbit HRP kit (Agilent, Santa Clara, CA) using diaminobenzidine to stain for eGFP and hematoxylin as counterstain. Slides were viewed with a Nikon Eclipse 80i microscope with an attached Nikon DXM 1200C digital camera (Nikon Instruments Inc., Melville, NY). IHC images were acquired using Aperio-Imagescope (Leica Biosystems, Wetzlar, Germany) and Huron Viewer (Huron Digital Pathology, Ontario, CA) software.

### Statistical Analysis.

[0223] All statistical analysis was performed using GraphPad Prism software using either a one-way or two-way analysis of variance (ANOVA) test.

### Example 1: Variations in AAVHSCs Lead to Different Glycan Affinity and Transduction Efficacy

[0224] AAVHSCs belong to Clade F, a clade that utilizes terminally exposed galactose for cellular binding. To determine if the naturally occurring variations on the AAVHSCs affect their binding, AAVHSC binding to CHO cell lines was examined. Lec2 are the mutant form of their parent, Pro5, and bear a mutation that reduces translocation of CMP-sialic acid, leading to high levels of surface exposed galactose on Lec2 (FIG. 2A). High and low levels of terminal galactose on Lec2 and Pro5 cells, respectively, were confirmed. Pro5 and Lec2 cells were transduced at a MOI of 2×10⁴ on ice for 1 hour. Binding was performed on ice to prevent bound AAV internalization and cells were washed with ice cold PBS to remove unbound particles prior to membrane bound vector genome (vg) analysis. For eGFP expression, cells were resuspended in media post washing, incubated overnight at 37° C. and assayed at 24 hours by flow cytometry.

[0225] All AAVHSCs displayed improved binding and transduction of Lec2 cells with terminally exposed galactose over the parent cell line Pro5, apart from AAVHSC16 (FIGS. 2B-2C). AAVHSC16 showed no difference in the number of vgs bound or eGFP expression for Lec2 and Pro5 cells, indicating AAVHSC16 does not share the galactose-binding feature of Clade F capsids. AAVHSC16 contains two unique residues compared to AAV9 and other AAVHSCs, 501I and 706C (Table 4). Both residues are surface exposed and therefore could affect either glycan and/or receptor binding.

TABLE 4
Amino Acid Variations in AAVHSCs with Respect to AAV9

| | Capsid Region | | |
|---|---|---|---|
| AAVHSC Serotype | VP1 | VP2 | VP3 |
| AAVHSC1 | A2T | — | — |
| AAVHSC3 | — | G161D | — |
| AAVHSC4 | F119L | — | P468S |
| AAVHSC6 | — | — | Q590R |
| AAVHSC7 | A68V | — | — |
| AAVHSC8 | — | Q151R | — |
| AAVHSC9 | — | — | C206G |
| AAVHSC13 | — | — | G505R |
| AAVHSC15 | — | — | G505R, T346A |
| AAVHSC16 | — | — | F501I, G505R, Y706C |
| AAVHSC17 | — | — | G505R |

[0226] While all AAVHSCs except for AAVHSC16 preferentially bound the Lec2 cells with terminal galactose exposed, the fold change in binding was different between two groups of AAVHSCs. It was observed that the AAVHSCs containing the 505R residue (AAVHSC13, 15, 16, and 17) had a lower fold binding enhancement in Lec2 than the capsids with 505G (AAVHSC1, 3, 4, 6, 7, 8, 9) (Table 4 and FIG. 2D). These data indicate that galactose binding was stronger in capsids with a glycine at residue 505 and that arginine negatively impacted galactose binding. The 505 residue is modeled within a loop on the surface of the capsid and part of a protrusion surrounding the galactose-binding pocket. The glycine to arginine variation increases the size and adds a positive charge at 505 and may affect galactose-binding due to either steric hindrance or difference in charge. AAVHSC4 displayed an increase in binding to galactose but had little eGFP expression in both cell lines (FIGS. 2B-2C).

### Example 2: Isoleucine at 501 Residue on AAVHSC16 is Responsible for Altered Terminal Galactose Binding

[0227] The contribution of each unique residue on AAVHSC16, 501I or 706C, in lowered galactose binding was investigated by mutagenizing the 501 and 706 residues on AAVHSC15, an AAVHSC that also contains 505R (see, Table 4 and 5) and the most studied capsid in the AAVHSC panel. As AAVHSC16 did not have robust binding or transduction of Pro5 or Lec2 cells, additional mutant CHO cell lines were included to assess AAVHSC16 and mutagenized capsid binding to other terminal glycans (FIG. 2A). The lack of terminal galactose was confirmed in Lec1 and Lec8 cells. Pro5, Lec1, Lec2, and Lec8 cells were transduced at a MOI of 5×10³ on ice for 1 hour. Cells were washed 3 times post transduction with cold PBS to determine surface bound vector genomes. GFP expression was determined 24 hours post incubation at 37° C. post washing.

TABLE 5
Amino Acid Mutagenesis of AAVHSC Capsid Proteins

| AAVHSC Serotype | Amino Acid Variation |
|---|---|
| AAVHSC7 | F501I |
| AAVHSC15 | F501I |
| AAVHSC15 | Y706C |
| AAVHSC16 | I501F |
| AAVHSC16 | C706Y |
| AAVHSC16 | I501L |
| AAVHSC16 | I501T |
| AAVHSC16 | I501V |
| AAVHSC16 | I501W |
| AAVHSC16 | I501Ya or “c1” |
| | (codon TAT) |
| AAVHSC16 | I501Yb or “c2” |
| | (codon TAC) |
| AAVHSC16 | T346A |

[0228] AAVHSC15 and AAVHSC16 did not display an increase in binding to Lec1 or Lec8 cells over Pro5 cells, indicating a lack of preferential binding to terminal GlcNAc (N-acetylglucosamine) or mannose (FIG. 3A). The binding pattern of AAVHSC15 with the Y706C variation was similar to AAVHSC15, with only increased binding to galactose observed. AAVHSC15 with the F501I variation mimicked the binding pattern of AAVHSC16, with no preferential binding to any of the terminal glycans on the CHO cell lines. These data indicate that the 501I residue on AAVHSC16 is the main contributor to the abolished galactose binding and supports previously published work on key residues of Clade F AAVs that influence galactose binding. Although 501, 505, and 706 residues are located on the surface of the capsid, only 501 and 505 are in close proximity to key galactose-binding residues of AAV9. While the pattern between AAVHSC15 and AAVHSC15 Y706C was similar, AAVHSC15 Y706C had significantly increased galactose binding and expression in Lec2s compared to wild-type (wt) AAVHSC15, indicating that a variation not in proximity to the galactose binding pocket altered binding and transduction of cells with high levels of surface exposed galactose (FIGS. 3A-3B).

[0229] AAVHSC15 F501I expressed in all CHO cell lines better than AAVHSC16 (FIG. 3B), indicating that remaining variations between these capsids, the 346 and 706 residues (Table 4), contribute to additional functional differences. These variations led to detectable eGFP expression (1 to >10%) with AAVHSC15 and 501 and 706 variants in cell lines with low levels of bound vgs. The highly efficient eGFP expression of AAVHSC15 and AAVHSC15 501 and 706 variants may be due to the T346A residue, which is not found on AAVHSC16. The 346 residue is located internally on the β-strand of the capsid and may play a role in intramolecular interactions, altering expression. 346T is highly conserved among serotypes including AAV2, AAV3b, AAV5, AAV6, AAV8, and AAV9.

[0230] To further confirm the contribution of 501I on AAVHSC16 to the lack of galactose binding, we generated and tested gain of function mutants AAVHSC16 I501F and AAVHSC16 C706Y for their binding and transduction efficiency on CHO cell lines (FIGS. 4A-4B). In addition to the AAVHSC16 gain of function mutants, the influence on glycan binding of the 501I residue was investigated on a non-505R AAVHSC (AAVHSC7, Table 4 and 5) as well the effect of the unique AAVHSC15 346A residue on transgene expression of AAVHSC16. AAVHSC16 Y706C did not display increased binding to surface exposed galactose but did result in significantly increased expression in Lec2s, indicating a post-attachment role of the Y706C variation for AAVHSC16. While the AAVHSC16 I501F displayed partially restored binding to terminal galactose and expression in Lec2 cells, the number of bound vgs and GFP expression were still significantly lower than wt AAVHSC15. This difference in binding and GFP expression between wt AAVHSC15 and AAVHSC16 I501F once again highlights the contribution of the unique 346 and 706 residues to functional differences between the capsids. The contribution of 346A, which is located internally on the capsid, to AAVHSC15 expression was highlighted in the AAVHSC16 T346A variant, where AAVHSC16 T346A showed higher GFP expression over wt AAVHSC16 with no significant increase in membrane bound vgs. Interestingly, AAVHSC7 F501I retained the ability to bind terminal galactose and transduce Lec2 (FIGS. 2B-2C and 4A-4B).

### Example 3: Amino Acid at 501 Residue on AAVHSC16 Contributes to Overall Binding Function

[0231] To test the specific contribution of isoleucine at the 501 residue to galactose binding, 501I on AAVHSC16 was mutagenized to leucine, threonine, valine, tryptophan, and two different tyrosine codons (Table 5). Pro5, Lec1, Lec2, and Lec8 cells were transduced at a MOI of 2×10⁴ (for FIGS. 5A-5B) on ice for 1 hour. Cells were washed 3 times post transduction with cold PBS to determine surface bound vector genomes (FIG. 5A). GFP expression was determined 24 hours post incubation at 37° C. post washing (FIG. 5B).

[0232] Leucine and valine are also hydrophobic amino acids with leucine similar in size to isoleucine, but both larger than valine due to an extra carboxyl group. Leucine is as hydrophobic as phenylalanine, and both are more hydrophobic than valine and isoleucine. Threonine and valine have a similar branch structure with the exception of a hydroxyl side chain but threonine and isoleucine are the only amino acids with two stereogenic centers. Tryptophan and tyrosine both contain an aromatic ring structure in their side chain, making them most similar in structure to phenylalanine, with tryptophan being a binuclear ring structure and the largest of all amino acids. Modeling of the mutagenized 501 residues on AAVHSC16 revealed that aromatic ring side chain of tryptophan and tyrosine side is predicted to occupy similar space in the pocket to phenylalanine. Binding analysis of 501 mutagenized AAVHSC16 capsids revealed that leucine, threonine, and valine variants have preferential binding to terminal GlcNAc of Lec8 cells, indicating a shift in glycan binding with leucine, threonine, or valine at 501 (FIG. 5A). This increase in binding to the Lec8 cells also led to increased eGFP expression for the leucine, threonine, or valine AAVHSC16 mutants. Interestingly, data previously published showed wheat germ agglutinin (WGA), which binds to GlcNAc, slightly reduced other Clade F AAV binding to Pro5 cells, indicating the leucine, threonine, or valine at the 501 position may be enhancing Clade F GlcNAc binding. The introduction of an aromatic ring at the 501 position with tryptophan or tyrosine allowed the AAVHSC16 I501W and I501Y variants to bind all terminal glycans along with restoration of preferential binding to terminal galactose as observed with other AAVHSCs containing a phenylalanine at 501.

[0233] eGFP expression was elevated in all CHO cells lines with 501 mutagenized AAVHSC16s compared to AAVHSC16, correlating with the improvement in overall binding (FIG. 5B). Although tryptophan and tyrosine were able to bind to all the terminal glycans of all the CHO cell lines at high efficiencies, only the Lec2 cells displayed high GFP expression at levels close to AAVHSC15, which also contains an aromatic ring at 501 with phenylalanine. No significant differences in binding or GFP expression was observed between AAVHSC16 YA and YB, indicating that the codon usage and tRNA availability did not alter this specific function. Differences observed here in binding versus expression are aligned with published data highlighting the 501 on AAV9 as a key residue for galactose binding and post-attachment processes up to expression. These data also imply that the specific amino acid and side chain at 501 influences the function of the virus.

### Example 4: AAVHSC16 has Significantly Reduced Hepatic Transduction in In Vivo and In Vitro Models

[0234] Adachi et al. observed that modulations to the 501 residue of AAV9 not only influenced glycan binding but also the in vivo tropism of that capsid. To test if differences in galactose-binding observed in vitro affect tropism in vivo, AAVHSC15 and AAVHSC16 were compared with two serotypes with weak and strong galactose binding, AAV2 and AAV9, respectively. Systemic biodistribution was assessed in albino C57 mice administered 1×10¹³ or 1×10¹⁴ vg/kg ssCBA.Luc vector I.V. At six weeks post dosing, total body bioluminescence was determined through imaging (FIG. 6A).

[0235] Total body bioluminescence revealed that AAV2, which does not bind galactose, had the lowest level of systemic expression at all doses tested (FIG. 6A). On the contrary, AAVHSC16 had comparable levels of total body expression to AAV9, despite their differences in galactose binding. This maintenance of total body expression for AAVHSC16 suggests that galactose binding is not sufficient to predict the overall systemic tropism in vivo. AAVHSC15, which binds strongly to terminal galactose, had the highest level of total body bioluminescence for both doses. To further characterize the tissue-specific tropism of AAV2, AAV9, AAVHSC15, AAVHSC16, AAVHSC15 F501I, and AAVHSC15 Y706C, key therapeutically relevant organs were assessed for bioluminescence post-harvest as well as cellular vgs (FIGS. 6B-6E). The liver was the only tissue with significant differences in bioluminescence observed between the capsids tested. AAVHSC16 lead to significantly lower levels of transgene expression in the liver compared to both AAV9 and AAVHSC15, with hepatic bioluminescence levels being insignificant to AAV2 at all doses tested. This lower liver tropism of AAVHSC16 ex vivo was in contrast to the whole body luminescence images, which displayed higher levels of bioluminescence located in the abdomen. It is possible that other tissues or fluids in the abdomen are contributing to this localized higher transgene expression for AAVHSC16. By examining the ratio of vgs among the different organs assayed, it became evident that AAVHSC16 also had a different biodistribution pattern with a lower ratio of vgs in the liver compared to the other Clade F AAVs tested. The ratio of vgs for AAV2 also revealed that it was less hepatic driven than galactose-binding AAV9 and AAVHSC15 with the lowest number of hepatic vgs. While AAVHSC16 had higher hepatic vgs than AAV2, approximately 6-fold higher for both doses, AAVHSC16 had between 4- and 16-fold lower liver vgs compared to AAV9 and AAVHSC15. In contrast to the significantly lower liver tropism, AAVHSC16 maintained high levels of transduction in the CNS and periphery, with equivalent vgs as AAV9 and AAVHSC15 in these tissues (FIGS. 6D-6E).

[0236] To further characterize tissue-specific expression of AAVHSC16 compared to AAV2, AAV9, AAVHSC15, AAVHSC15 F501I, and/or AAVHSC15 Y706C, CD1 mice were injected I.V. with 7.5×10¹² vg/kg of scCBA.eGFP vector with eGFP expression and vgs determined at 4 weeks post dose (FIG. 7). A different strain and dose were chosen to determine if the lower hepatic transduction was influenced by either variable. Liver vgs were found to be lower with AAVHSC16 compared to AAV9, AAVHSC15, and unexpectedly, AAV2. Hepatic GFP expression among the different capsids correlated with hepatic vgs (FIG. 7). AAVHSC16 vgs were between 2- and 3-fold lower in the brain, spinal cord, and gastrocnemius compared to AAVHSC15 yet were comparable or slightly higher than AAV9 in these tissues. AAV9 displayed the most robust GFP expression in the peripheral tissues (heart, liver, gastrocnemius) but lead to drastically lower GFP expression in the CNS tissue (brain and spinal cord) compared to AAVHSC15 and AAVHSC16. Although AAVHSC16 had higher vgs in the heart compared to AAVHSC15 and AAV9, expression appeared lower with AAVHSC16. Differences in sampling of the heart for vg and expression analysis or capsid specific expression mechanisms of action may explain this discrepancy. The vg and eGFP expression analysis of AAVHSC16 demonstrates the maintenance of broad biodistribution of this AAVHSC with lowered liver tropism.

[0237] To determine if the unique tropism of AAVHSC16 is species specific, we investigated biodistribution in NHPs. Biodistribution of AAVHSC15 and AAVHSC16 was examined in two cynomolgus macaques (Macaca fascicularis) per capsid at 2 weeks post I.V. delivery of scCBA.eGFP vector at a 7×10¹³ vg/kg dose. eGFP expression was substantially greater in the liver of NHPs with AAVHSC15 compared with those that received AAVHSC16. NHPs administered AAVHSC16 had approximately three logs fewer hepatic vgs than NHPs administered AAVHSC15 (FIG. 8A). Despite variability between individual NHPs, AAVHSC16 maintained high and equivalent levels of transduction (vgs) and expression in the heart, gastrocnemius and brain compared to AAVHSC15, indicating high levels of non-hepatic and broad systemic tropism in vivo were not species restrained. The reduced hepatic tropism of AAVHSC16 also did not lead to increased levels of liver transaminases above baseline or compared to vehicle controls (FIGS. 8B-8D). In addition, NHPs administered AAVHSC16 scCBA.eGFP at 7×10¹³ vg/kg or a vector expressing human phenylalanine hydroxylase driven by a liver specific promoter (ssDNG.PAH) at 1×10¹⁴ vg/kg did not display elevated ALT or AST levels at any timepoint post dose compared to baseline levels (FIG. 8D). Supporting the finding that the reduced liver tropism of AAVHSC16 led to reduced liver toxicity, it was found that liver-tropic capsids AAV9, AAVHSC8, and AAVHSC17 led to increased ALT and AST levels in NHPs (FIGS. 8E-8G).

[0238] In an effort to translate the lowered liver tropism of AAVHSC16 observed in the mouse and NHPs to human cells, primary hepatocytes were transduced with several wt AAVHSC and AAVHSC variant scCBA.eGFP vectors at three multiplicities of infection (MOIs). At four days post transduction, AAVHSC15, AAV9, AAVHSC7, and AAVHSC7 F501I led to greater eGFP expression than AAVHSC16 and all AAVHSC16 variants at all MOIs tested. As observed in vitro with the CHO cells, the internally located 346A residue change alone on AAVHSC16 increased expression in primary human hepatocytes. The AAVHSC15 variants containing either the AAVHSC16 501I or 706C revealed that the lower hepatocyte expression from AAVHSC16 is primarily due to the 706C variation and not the galactose altering 501I variation. The AAVHSC16 gain of function mutants also revealed that the variation at the 706 residue was the main contributor to lowered hepatocyte expression, as AAVHSC16 C706Y had more expression restored than AAVHSC16 I501F. While all 501 changes (L, T, V, W, and Y) partially restored expression of AAVHSC16 in the hepatocytes, the largest and most intrusive 501 change with tryptophan restored the least amount of hepatic eGFP expression. The lack of eGFP expression observed with AAVHSC16 in primary human hepatocytes along with the AAVHSC16 501 mutants reinforced that the significantly reduced hepatic tropism can be translated among species and that all unique amino acid variations contribute to the unique binding and biodistribution of AAVHSC16.

### Example 5: Naturally Occurring Variations at the 501 and 706 Residues on AAVHSC16 Contribute to Slower Serum Clearance

[0239] Blood and serum clearance of AAV was measured by quantifying AAV vectors by qPCR in serial blood draw samples taken at 2 minutes, 3 minutes, 1 hour, 3-4 hours, 8 hours, 24-28 hours, and 48 hours post-dose of B6 Albino mouse administered AAVHSC15, AAVHSC16, AAVHSC15-F501I, or AAVHSC15-Y706C scCBA-GFP vectors via retro-orbital injection at 7.5×10¹² vg/kg. As shown in FIG. 9A, mice administered AAVHSC16 had slower clearance of vector genomes from the blood compared to mice administered AAVHSC15. When the naturally occurring variations F501I and Y706C were mutated in AAVHSC15, mice administered AAVHSC15-F501I and AAVHSC15-Y706C resulted in slower clearance of vector genomes from the blood compared to mice administered AAVHSC15. As shown in FIG. 9B, mice administered AAVHSC16 had slower clearance of vector genomes from both whole blood and serum as compared to mice administered AAVHSC15.

### Example 6: Variation at Residue 505 on AAVHSC7 and AAVHSC8

[0240] Based on the findings presented in Example 2, because AAVHSC7 has a glycine at residue 505, as opposed to the 505 arginine on AAVHSC15 and AAVHSC16, the findings indicate that residue 501I on AAVHSC16 contributes to the obliteration of terminal galactose binding, but only in combination with the 505R neighboring residue. To investigate the effect of 505R on non-505R AAVHSC, 505R was incorporated into AAVHSC7 and AAVHSC8. scCBA.eGFP vectors packaged in AAVHSC15, AAVHSC7, AAVHSC7-G505R, AAVHSC8, and AAVHSC8-G505R were intravenously administered into CD1 mice at a dose of 7.5e12 vg/kg. Tissue-specific transduction efficiency was determined by ddPCR 4 weeks post-administration (FIG. 10). As shown in FIG. 10, the incorporation of G505R to AAVHSC7 and AAVHSC8 elevated their ability to transduce liver cells without affecting their ability to transduce cells of the heart, muscle, brain, or spinal cord.

### Example 7: Variations at Residues 501 and 346 on AAVHSC16

[0241] As shown in Example 4, incorporating the internally located 346A to AAVHSC16 led to increased expression in primary human hepatocytes. Example 4 also demonstrated that the lower hepatocyte expression from AAVHSC16 is primarily due to the 706C variation and not the galactose altering 501I variation. To further investigate the function of residues 346 and 501, 346A and different 501 variations were incorporated into AAVHSC16. Residue 501 on AAVHSC16 was changed to tyrosine and tryptophan to reintroduce an aromatic ring (residue 501 is a phenylalanine on other AAVHSC capsids). scCBA.eGFP vectors packaged in AAVHSC15, AAVHSC16, AAVHSC16-T346A, AAVHSC16-I501F, AAVHSC16-I501YB (codon TAC), and AAVHSC16-1501W were intravenously administered into CD1 mice at a dose of 7.5e12 vg/kg. Tissue-specific transduction efficiency was determined by ddPCR 4 weeks post-administration (FIG. 11). As shown in FIG. 11, T346A and I501F on AAVHSC16 resulted in increased liver transduction and a decrease in the transduction of other tissues. When I501YB and I501W were incorporated into AAVHSC16, the lower liver targeting was maintained, but resulted in changes to the tropism of other tissues. AAVHSC16-1501W demonstrated higher transduction of the brain, heart, muscle, and spinal cord, compared to AAVHSC16-I501Y.

### Example 8: Transduction of Heart and Liver Cells

[0242] The ability of each of the capsids in Table 5, as well as AAV9, AAVHSC1, AAVHSC3, AAVHSC4, AAVHSC6, AAVHSC7, AAVHSC8, AAVHSC9, AAVHSC13, AAVHSC15, AAVHSC16, and AAVHSC17 capsids, to transduce heart and liver cells was investigated. Rat H9C2 cardiomyoblasts, Human Ac16 cardiomyocytes, and primary human hepatocytes were transduced with scCBA.eGFP vectors packaged in the various capsids under the conditions set forth in Table 6.

TABLE 6
Transduction Conditions

| | Rat | Human | |
|---|---|---|---|
| | Cardiomyo- | Cardiomyo- | Primary |
| | blasts | cytes | Human |
| Cell type | (H9C2) | (Ac16) | Hepatocytes |
| Cell density at seeding | 50k | 50k | 100k |
| Day transduced | Day 4 | Day 4 | Day 1 |
| Cell density at trans- | 75k | 300k | Same day |
| duction | | | |
| MOI | 6e5 | 6e5 | 1.5E5, 3E5 and 6e5 |
| Days at harvest | Day 6 | Day 6 | Day 5 |
| | | | (media change at |
| | | | Day 3) |

[0243] After harvest, vector genome analysis was performed as previously described. For H9C2 cells, vgs were determined by qPCR using primers and probes specific for GFP and rat GAPDH. For Ac16 cells and primary human hepatocytes, vgs were determined by qPCR using primers and probes specific for GFP and human ApoB. FIGS. 12A, 12B, and 12C show the vgs/allele of H9C2, Ac16, and primary human hepatocytes transduced with the various vectors, respectively.

[0244] A subset of the capsids tested in primary rat and human cells were investigated in vivo. scCBA.eGFP vectors packaged in the capsids set forth in Table 7 were intravenously administered into CD1 mice at a dose of 7.5e12 vg/kg.

TABLE 7
Capsids and Amino Acid Variations

| Capsid | Amino Acid Variation |
|---|---|
| AAV2 | None |
| AAV9 | None |
| AAVHSC7 | None |
| AAVHSC7 | G505R |
| AAVHSC8 | None |
| AAVHSC8 | G505R |
| AAVHSC15 | None |
| AAVHSC15 | F501I |
| AAVHSC15 | Y706C |
| AAVHSC16 | None |
| AAVHSC16 | T346A |
| AAVHSC16 | I501F |
| AAVHSC16 | I501Y |
| AAVHSC16 | I501W |

[0245] FIGS. 13A, 13B, and 13C show the transduction efficiency of heart, gastrocnemius, and liver, respectively, as determined by ddPCR 4 weeks post-administration. FIG. 13D shows the ratio of transduction efficiency of the various rAAV of heart to the transduction efficiency of the various rAAV to liver, and FIG. 13E shows the ratio of transduction efficiency of the various rAAV of muscle to the transduction efficiency of the various rAAV to liver.

### Example 9: Transduction of Various Tissues and Cross-Correction Potential by AAVHSC16

[0246] Lysosomal storage disorders (LSDs) are a group of genetic diseases that result in metabolic issues of the lysosome. LSDs typically are caused by the genetic loss of a catabolic enzyme, thereby causing the accumulation of the enzyme's substrate within the lysosome. Over time, tissue-specific accumulation of the substrate results in a spectrum of symptoms and disabilities that vary by LSD. LSDs are attractive targets for gene therapy because of the potential for cross-correction, a phenomenon that allows specific extracellular LSD enzymes to be taken up and targeted to the lysosomes of otherwise enzyme-deficient cells. The LSD mucopolysaccharidosis II (Hunter syndrome) is caused by a deficiency in iduronate-2-sulfatase (I2S) that is encoded by the IDS gene.

[0247] The ability of AAVHSC16 to transduce various tissues was investigated. Mice were intravenously administered a rAAV comprising a ubiquitous promoter operably linked to a transgene encoding IDS (single-stranded CMV-IDS) packaged in AAVHSC16 (“AAVHSC16-IDS”) at a dose of 1E12 vg/kg, 5E12 vg/kg, 1E13 vg/kg, 5E13 vg/kg, or 1E14 vg/kg. Animals were handled and tissues were processed as previously described. Vector genome copies per allele were determined by ddPCR with probes specific for the IDS transgene.

[0248] FIG. 14A is a graph showing the efficiency of AAVHSC16 to transduce heart, lung, brain, kidney, spleen tissues, as well as the trigeminal ganglion in the peripheral nervous system, presented as a ratio between the level of transduction of the various tissues to the level of transduction of liver tissue. Ratios were calculated by dividing the average vgs/allele of each specified tissue by the average vgs/allele in the liver. As shown in FIG. 14A, AAVHSC16 demonstrated a favorable heart:liver ratio with at least 0.5 vgs to every liver vg for all doses tested.

[0249] As shown in FIG. 14B, AAVHSC16 was capable of mediating a higher expression level (transcripts per vg per cell) in the heart than liver at higher doses (FIG. 14B).

[0250] In order to investigate the potential of AAVHSC16 to mediate cross-correction, mice were intravenously administered AAVHSC16-IDS at a dose of 1E12 vg/kg, 5E12 vg/kg, 1E13 vg/kg, 5E13 vg/kg, or 1E14 vg/kg. Animals were handled and tissues were processed as described in Example 1. Vector genome copies per allele were determined by qPCR with probes specific for the IDS transgene.

[0251] As shown in FIGS. 15A and 15B, AAVHSC16-mediated delivery of IDS resulted in dose-dependent IDS transcript expression in the heart (FIG. 15A) and liver (FIG. 15B) with no plateau observed at the doses tested.

[0252] I2S activity in the liver and serum were determined using a two-step fluorometric assay. Briefly, tissues or serum were incubated with a fluorescently labeled α-L-iduronide-2-sulphate (4-MUS). After 4 hours, IDUA was added to the reaction which led to the release of the fluorescent final product 4-methylumbelliferone (4-MU). I2S activity was determined by a plate reader after reaction was excited at 365 nM and signal was read at 445 nM. As shown in FIGS. 16A and 16B, dose dependent I2S activity was observed in the liver, presented as fold liver I2S activity over wild-type (FIG. 16A; I2S activity in the liver of mice administered formulation buffer control), as well as in the serum, presented as fold serum I2S activity over wild-type (FIG. 16B). AAVHSC16-mediated I2S expression reached supraphysiologic levels of I2S activity in the liver at the 1E13 vg/kg dose and above, and supraphysiologic levels of I2S activity in the serum between the 1E13 vg/kg and 5E13 vg/kg doses. Taken together, this indicates that low levels of liver transduction can still lead to hepatic protein activity, secretion and cross-correction potential. Without being bound to any theory, transduction of other tissues may contribute to serum secretion.

[0253] The invention is not to be limited in scope by the specific embodiments described herein. Indeed, various modifications of the invention in addition to those described will become apparent to those skilled in the art from the foregoing description and accompanying figures. Such modifications are intended to fall within the scope of the appended claims.

[0254] All references (e.g., publications or patents or patent applications) cited herein are incorporated herein by reference in their entirety and for all purposes to the same extent as if each individual reference (e.g., publication or patent or patent application) was specifically and individually indicated to be incorporated by reference in its entirety for all purposes. Other embodiments are within the following claims.

1. (canceled)

2. A recombinant adeno-associated virus (AAV) capsid protein, wherein:
the amino acid in the capsid protein corresponding to amino acid position 346 of SEQ ID NO: 14 is alanine; the amino acid in the capsid protein corresponding to amino acid position 501 of SEQ ID NO: 14 is isoleucine; the amino acid in the capsid protein corresponding to amino acid position 505 of SEQ ID NO: 14 is arginine; and/or the amino acid in the capsid protein corresponding to amino acid position 706 of SEQ ID NO: 14 is cysteine, wherein the capsid protein does not comprise the amino acid sequence of amino acids 203-736 of SEQ ID NOs: 11-15; or
the amino acid in the capsid protein corresponding to amino acid positions 346, 501, 505, and/or 706 of SEQ ID NO: 14 is not the wild type amino acid.

3. The recombinant AAV capsid protein of claim 2, wherein:
a) the amino acid in the capsid protein corresponding to amino acid position 501 of SEQ ID NO: 14 is isoleucine, and the amino acid in the capsid protein corresponding to amino acid position 505 of SEQ ID NO: 14 is arginine;
b) the amino acid in the capsid protein corresponding to amino acid position 501 of SEQ ID NO: 14 is isoleucine, and the amino acid in the capsid protein corresponding to amino acid position 706 of SEQ ID NO: 14 is cysteine;
c) the amino acid in the capsid protein corresponding to amino acid position 505 of SEQ ID NO: 14 is arginine, and the amino acid in the capsid protein corresponding to amino acid position 706 of SEQ ID NO: 14 is cysteine,
d) the amino acid in the capsid protein corresponding to amino acid position 501 of SEQ ID NO: 14 is isoleucine, the amino acid in the capsid protein corresponding to amino acid position 505 of SEQ ID NO: 14 is arginine, and the amino acid in the capsid protein corresponding to amino acid position 706 of SEQ ID NO: 14 is cysteine;
e) The recombinant AAV capsid protein of claim 1 or 2, wherein the amino acid in the capsid protein corresponding to amino acid position 346 of SEQ ID NO: 14 is alanine, the amino acid in the capsid protein corresponding to amino acid position 501 of SEQ ID NO: 14 is isoleucine, and the amino acid in the capsid protein corresponding to amino acid position 505 of SEQ ID NO: 14 is arginine;
f) the amino acid in the capsid protein corresponding to amino acid position 346 of SEQ ID NO: 14 is alanine, the amino acid in the capsid protein corresponding to amino acid position 501 of SEQ ID NO: 14 is isoleucine, and the amino acid in the capsid protein corresponding to amino acid position 706 of SEQ ID NO: 14 is cysteine;
g) the amino acid in the capsid protein corresponding to amino acid position 346 of SEQ ID NO: 14 is alanine, the amino acid in the capsid protein corresponding to amino acid position 505 of SEQ ID NO: 14 is arginine, and the amino acid in the capsid protein corresponding to amino acid position 706 of SEQ ID NO: 14 is cysteine; or
h) the amino acid in the capsid protein corresponding to amino acid position 346 of SEQ ID NO: 14 is alanine, the amino acid in the capsid protein corresponding to amino acid position 501 of SEQ ID NO: 14 is isoleucine, the amino acid in the capsid protein corresponding to amino acid position 505 of SEQ ID NO: 14 is arginine, and the amino acid in the capsid protein corresponding to amino acid position 706 of SEQ ID NO: 14 is cysteine.

4-10. (canceled)

11. The recombinant AAV capsid protein of claim 2, wherein the recombinant AAV capsid protein is a variant of a clade A, clade B, clade C, clade D, clade E, clade F, clade G, clade H, clade I, AAVgo.1, AAV3, AAV4, AAV10, AAV11, AAV12, rh.32, rh32.33, rh.33, rh.34, BAAV, or AAV5 capsid protein.

12. The recombinant AAV capsid protein of claim 2, comprising an amino acid sequence that is 95% identical to any one of the amino acid sequences of SEQ ID NOs: 1-30.

13. The recombinant AAV capsid protein of claim 2, comprising any one of the amino acid sequences of SEQ ID NOs: 31-411 and 453-1304.

14. An isolated polynucleotide encoding the recombinant AAV capsid protein of claim 2.

15. A vector comprising the polynucleotide of claim 14, wherein:
the vector is a plasmid;
the vector is an expression vector; and/or
the vector is a viral vector, optionally wherein the viral vector is a retrovirus vector, a herpes virus vector, a baculovirus vector, or an adenovirus vector.

16-18. (canceled)

19. A recombinant cell comprising the vector of claim 15.

20. A method of producing a recombinant AAV capsid protein, the method comprising culturing the recombinant cell of claim 19 under conditions where the polynucleotide is expressed, and the capsid protein is produced.

21. A recombinant adeno-associated virus (rAAV) comprising:
(a) a capsid comprising one or more of the recombinant AAV capsid protein of claim 2; and
(b) an rAAV genome.

22. The rAAV of claim 21, wherein:
the rAAV genome comprises a transgene, optionally wherein:
the transgene encodes a polypeptide;
the transgene encodes a miRNA, shRNA, siRNA, antisense RNA, gRNA, antagomir, miRNA sponge, RNA aptazyme, RNA aptamer, lncRNA, ribozyme, or mRNA; and/or
the transgene is operably linked to a transcriptional regulatory element; or
the rAAV genome comprises an editing genome.

23-26. (canceled)

27. A method for transducing a cell, the method comprising contacting the cell with the rAAV of claim 21 under conditions whereby the cell is transduced.

28. A method for delivering a transgene in a cell, the method comprising contacting the cell with the rAAV of claim 21 under conditions whereby the cell is transduced and the transgene is expressed.

29. A method for editing a target locus in a genome of a cell, the method comprising contacting the rAAV of claim 21 under conditions whereby the cell is transduced and the target locus is edited.

30-32. (canceled)

33. A packaging system for preparation of an rAAV, wherein the packaging system comprises:
(a) a first nucleotide sequence encoding one or more AAV Rep proteins;
(b) a second nucleotide sequence encoding the recombinant AAV capsid protein of claim 2; and
(c) a third nucleotide sequence comprising an rAAV genome sequence.

34-41. (canceled)

42. A method for recombinant preparation of an rAAV, the method comprising introducing the packaging system of claim 33 into a cell under conditions whereby the rAAV is produced.

43. (canceled)

44. A recombinant cell comprising the polynucleotide of claim 14.

45. A method of producing a recombinant AAV capsid protein, the method comprising culturing the recombinant cell of claim 44 under conditions where the polynucleotide is expressed, and the capsid protein is produced.

The application's sequence listing, which the Patent Office published only in electronic form, follows.

SEQUENCE LISTING (1304 sequences)

SEQ ID NO: 1 - protein, 736 aa, synthetic construct
MTADGYLPDWLEDNLSEGIREWWALKPGAPQPKANQQHQDNARGLVLPGYKYLGPGNGLDKGEPVNAADAAALEHDKAYDQQLKAGDNPYLKYNHADAEFQERLKEDTSFGGNLGRAVFQAKKRLLEPLGLVEEAAKTAPGKKRPVEQSPQEPDSSAGIGKSGAQPAKKRLNFGQTGDTESVPDPQPIGEPPAAPSGVGSLTMASGGGAPVADNNEGADGVGSSSGNWHCDSQWLGDRVITTSTRTWALPTYNNHLYKQISNSTSGGSSNDNAYFGYSTPWGYFDFNRFHCHFSPRDWQRLINNNWGFRPKQLNFKLFNIQVKEVTDNNGVKTIANNLTSTVQVFTDSDYQLPYVLGSAHEGCLPPFPADVFMIPQYGYLTLNDGSQAVGRSSFYCLEYFPSQMLRTGNNFQFSYEFENVPFHSSYAHSQSLDRLMNPLIDQYLYYLSKTINGSGQNQQTLKFSVAGPSNMAVQGRNYIPGPSYRQQRVSTTVTQNNNSEFAWPGASSWALNGRNSLMNPGPAMASHKEGEDRFFPLSGSLIFGKQGTGRDNVDADKVMITNEEEIKTTNPVATESYGQVATNHQSAQAQAQTGWVQNQGILPGMVWQDRDVYLQGPIWAKIPHTDGNFHPSPLMGGFGMKHPPPQILIKNTPVPADPPTAFNKDKLNSFITQYSTGQVSVEIEWELQKENSKRWNPEIQYTSNYYKSNNVEFAVNTEGVYSEPRPIGTRYLTRNL

SEQ ID NO: 2 - protein, 736 aa, synthetic construct
MAADGYLPDWLEDNLSEGIREWWALKPGAPQPKANQQHQDNARGLVLPGYKYLGPGNGLDKGEPVNAADAAALEHDKAYDQQLKAGDNPYLKYNHADAEFQERLKEDTSFGGNLGRAVFQAKKRLLEPLGLVEEAAKTAPGKKRPVEQSPQEPDSSAGIGKSGAQPAKKRLNFGQTGDTESVPDPQPIGEPPAAPSGVGSLTMASGGGAPVADNNEGADGVGSSSGNWHCDSQWLGDRVITTSTRTWALPTYNNHLYKQISNSTSGGSSNDNAYFGYSTPWGYFDFNRFHCHFSPRDWQRLINNNWGFRPKRLNFKLFNIQVKEVTDNNGVKTIANNLTSTVQVFTDSDYQLPYVLGSAHEGCLPPFPADVFMIPQYGYLTLNDGSQAVGRSSFYCLEYFPSQMLRTGNNFQFSYEFENVPFHSSYAHSQSLDRLMNPLIDQYLYYLSKTINGSGQNQQTLKFSVAGPSNMAVQGRNYIPGPSYRQQRVSTTVTQNNNSEFAWPGASSWALNGRNSLMNPGPAMASHKEGEDRFFPLSGSLIFGKQGTGRDNVDADKVMITNEEEIKTTNPVATESYGQVATNHQSAQAQAQTGWVQNQGILPGMVWQDRDVYLQGPIWAKIPHTGGNFHPSPLMGGFGMKHPPPQILIKNTPVPADPPTAFNKDKLNSFITQYSTGQVSVEIEWELQKENSKRWNPEIQYTSNYYKSNNVEFAVNTGGVYSEPRPIGTRYLTRNL

SEQ ID NO: 3 - protein, 736 aa, synthetic construct
MAADGYLPDWLEDNLSEGIREWWALKPGAPQPKANQQHQDNARGLVLPGYKYLGPGNGLDKGEPVNAADAAALEHDKAYDQQLKAGDNPYLKYNHADAEFQERLKEDTSFGGNLGRAVFQAKKRLLEPLGLVEEAAKTAPGKKRPVEQSPQEPDSSAGIDKSGAQPAKKRLNFGQTGDTESVPDPQPIGEPPAAPSGVGSLTMASGGGAPVADNNEGADGVGSSSGNWHCDSQWLGDRVITTSTRTWALPTYNNHLYKQISNSTSGGSSNDNAYFGYSTPWGYFDFNRFHCHFSPRDWQRLINNNWGFRPKRLNFKLFNIQVKEVTDNNGVKTIANNLTSTVQVFTDSDYQLPYVLGSAHEGCLPPFPADVFMIPQYGYLTLNDGSQAVGRSSFYCLEYFPSQMLRTGNNFQFSYEFENVPFHSSYAHSQSLDRLMNPLIDQYLYYLSKTINGSGQNQQTLKFSVAGPSNMAVQGRNYIPGPSYRQQRVSTTVTQNNNSEFAWPGASSWALNGRNSLMNPGPAMASHKEGEDRFFPLSGSLIFGKQGTGRDNVDADKVMITNEEEIKTTNPVATESYGQVATNHQSAQAQAQTGWVQNQGILPGMVWQDRDVYLQGPIWAKIPHTDGNFHPSPLMGGFGMKHPPPQILIKNTPVPADPPTAFNKDKLNSFITQYSTGQVSVEIEWELQKENSKRWNPEIQYTSNYYKSNNVEFAVNTEGVYSEPRPIGTRYLTRNL

SEQ ID NO: 4 - protein, 736 aa, synthetic construct
MAADGYLPDWLEDNLSEGIREWWALKPGAPQPKANQQHQDNARGLVLPGYKYLGPGNGLDKGEPVNAADAAALEHDKAYDQQLKAGDNPYLKYNHADAEFQERLKEDTSFGGNLGRAVLQAKKRLLEPLGLVEEAAKTAPGKKRPVEQSPQEPDSSAGIGKSGAQPAKKRLNFGQTGDTESVPDPQPIGEPPAAPSGVGSLTMASGGGAPVADNNEGADGVGSSSGNWHCDSQWLGDRVITTSTRTWALPTYNNHLYKQISNSTSGGSSNDNAYFGYSTPWGYFDFNRFHCHFSPRDWQRLINNNWGFRPKRLNFKLFNIQVKEVTDNNGVKTIANNLTSTVQVFTDSDYQLPYVLGSAHEGCLPPFPADVFMIPQYGYLTLNDGSQAVGRSSFYCLEYFPSQMLRTGNNFQFSYEFENVPFHSSYAHSQSLDRLMNPLIDQYLYYLSKTINGSGQNQQTLKFSVAGSSNMAVQGRNYIPGPSYRQQRVSTTVTQNNNSEFAWPGASSWALNGRNSLMNPGPAMASHKEGEDRFFPLSGSLIFGKQGTGRDNVDADKVMITNEEEIKTTNPVATESYGQVATNHQSAQAQAQTGWVQNQGILPGMVWQDRDVYLQGPIWAKIPHTDGNFHPSPLMGGFGMKHPPPQILIKNTPVPADPPTAFNKDKLNSFITQYSTGQVSVEIEWELQKENSKRWNPEIQYTSNYYKSNNVEFAVNTEGVYSEPRPIGTRYLTRNL

SEQ ID NO: 5 - protein, 736 aa, synthetic construct
MAADGYLPDWLEDNLSEGIREWWALKPGAPQPKANQQHQDNARGLVLPGYKYLGPGNGLDKGEPVNAADAAALEHDRAYDQQLKAGDNPYLKYNHADAEFQERLKEDTSFGGNLGRAVFQAKKRLLEPLGLVEEAAKTAPGKKRPVEQSPQEPDSSAGIGKSGAQPAKKRLNFGQTGDTESVPDPQPIGEPPAAPSGVGSLTMASGGGAPVADNNEGADGVGSSSGNWHCDSQWLGDRVITTSTRTWALPTYNNHLYKQISNSTSGGSSNDNAYFGYSTPWGYFDFNRFHCHFSPRDWQRLINNNWGFRPKRLNFKLFNIQVKEVTDNNGVKTIANNLTSTVQVFTDSDYQLPYVLGSAHEGCLPPFPADVFMIPQYGYLTLNDGSQAVGRSSFYCLEYFPSQMLRTGNNFQFSYEFENVPFHSSYAHSQSLDRLMNPLIDQYLYYLSKTINGSGQNQQTLKFSVAGPSNMAVQGRNYIPGPSYRQQRVSTTVTQNNNSEFAWPGASSWALNGRNSLMNPGPAMASHKEGEDRFFPLSGSLIFGKQGTGRDNVDADKVMITNEEEIKTTNPVATESYGQVATNHQSAQAQAQTGWVQNQGILPGMVWQDRDVYLQGPIWAKIPHTDGNFHPSPLMGGFGMKHPPPQILIKNTPVPADPPTAFNKDKLNSFITQYSTGQVSVEIEWELQKKNSKRWNPEIQYTSNYYKSNNVEFAVNTEGVYSEPRPIGTRYLTRNL

SEQ ID NO: 6 - protein, 736 aa, synthetic construct
MAADGYLPDWLEDNLSEGIREWWALKPGAPQPKANQQHQDNARGLVLPGYKYLGPGNGLDKGEPVNAADAAALEHDKAYDQQLKAGDNPYLKYNHADAEFQERLKEDTSFGGNLGRAVFQAKKRLLEPLGLVEEAAKTAPGKKRPVEQSPQEPDSSAGIGKSGAQPAKKRLNFGQTGDTESVPDPQPIGEPPAAPSGVGSLTMASGGGAPVADNNEGADGVGSSSGNWHCDSQWLGDRVITTSTRTWALPTYNNHLYKQISNSTSGGSSNDNAYFGYSTPWGYFDFNRFHCHFSPRDWQRLINNNWGFRPKRLNFKLFNIQVKEVTDNNGVKTIANNLTSTVQVFTDSDYQLPYVLGSAHEGCLPPFPADVFMIPQYGYLTLNDGSQAVGRSSFYCLEYFPSQMLRTGNNFQFSYEFENVPFHSSYAHSQSLDRLMNPLIDQYLYYLSKTINGSGQNQQTLKFSVAGPSNMAVQGRNYIPGPSYRQQRVSTTVTQNNNSEFAWPGASSWALNGRNSLMNPGPAMASHKEGEDRFFPLSGSLIFGKQGTGRDNVDADKVMITNEEEIKTTNPVATESYGQVATNHQSAQARAQTGWVQNQGILPGMVWQDRDVYLQGPIWAKIPHTDGNFHPSPLMGGFGMKHPPPQILIKNTPVPADPPTAFNKDKLNSFITQYSTGQVSVEIEWELQKENSKRWNPEIQYTSNYYKSNNVEFAVNTEGVYSEPRPIGTRYLTRNL

SEQ ID NO: 7 - protein, 736 aa, synthetic construct
MAADGYLPDWLEDNLSEGIREWWALKPGAPQPKANQQHQDNARGLVLPGYKYLGPGNGLDKGEPVNAVDAAALEHDKAYDQQLKAGDNPYLKYNHADAEFQERLKEDTSFGGNLGRAVFQAKKRLLEPLGLVEEAAKTAPGKKRPVEQSPQEPDSSAGIGKSGAQPAKKRLNFGQTGDTESVPDPQPIGEPPAAPSGVGSLTMASGGGAPVADNNEGADGVGSSSGNWHCDSQWLGDRVITTSTRTWALPTYNNHLYKQISNSTSGGSSNDNAYFGYSTPWGYFDFNRFHCHFSPRDWQRLINNNWGFRPKRLNFKLFNIQVKEVTDNNGVKTIANNLTSTVQVFTDSDYQLPYVLGSAHEGCLPPFPADVFMIPQYGYLTLNDGSQAVGRSSFYCLEYFPSQMLRTGNNFQFSYEFENVPFHSSYAHSQSLDRLMNPLIDQYLYYLSKTINGSGQNQQTLKFSVAGPSNMAVQGRNYIPGPSYRQQRVSTTVTQNNNSEFAWPGASSWALNGRNSLMNPGPAMASHKEGEDRFFPLSGSLIFGKQGTGRDNVDADKVMITNEEEIKTTNPVATESYGQVATNHQSAQAQAQTGWVQNQGILPGMVWQDRDVYLQGPIWAKIPHTDGNFHPSPLMGGFGMKHPPPQILIKNTPVPADPPTAFNKDKLNSFITQYSTGQVSVEIEWELQKENSKRWNPEIQYTSNYYKSNNVEFAVNTEGVYSEPRPIGTRYLTRNL

SEQ ID NO: 8 - protein, 736 aa, synthetic construct
MAADGYLPDWLEDNLSEGIREWWALKPGAPQPKANQQHQDNARGLVLPGYKYLGPGNGLDKGEPVNAADAAALEHDKAYDQQLKAGDNPYLKYNHADAEFQERLKEDTSFGGNLGRAVFQAKKRLLEPLGLVEEAAKTAPGKKRPVEQSPREPDSSAGIGKSGAQPAKKRLNFGQTGDTESVPDPQPIGEPPAAPSGVGSLTMASGGGAPVADNNEGADGVGSSSGNWHCDSQWLGDRVITTSTRTWALPTYNNHLYKQISNSTSGGSSNDNAYFGYSTPWGYFDFNRFHCHFSPRDWQRLINNNWGFRPKRLNFKLFNIQVKEVTDNNGVKTIANNLTSTVQVFTDSDYQLPYVLGSAHEGCLPPFPADVFMIPQYGYLTLNDGSQAVGRSSFYCLEYFPSQMLRTGNNFQFSYEFENVPFHSSYAHSQSLDRLMNPLIDQYLYYLSKTINGSGQNQQTLKFSVAGPSNMAVQGRNYIPGPSYRQQRVSTTVTQNNNSEFAWPGASSWALNGRNSLMNPGPAMASHKEGEDRFFPLSGSLIFGKQGTGRDNVDADKVMITNEEEIKTTNPVATESYGQVATNHQSAQAQAQTGWVQNQGILPGMVWQDRDVYLQGPIWAKIPHTDGNFHPSPLMGGFGMKHPPPQILIKNTPVPADPPTAFNKDKLNSFITQYSTGQVSVEIEWELQKENSKRWNPEIQYTSNYYKSNNVEFAVNTEGVYSEPRPIGTRYLTRNL

SEQ ID NO: 9 - protein, 736 aa, synthetic construct
MAADGYLPDWLEDNLSEGIREWWALKPGAPQPKANQQHQDNARGLVLPGYKYLGPGNGLDKGEPVNAADAAALEHDKAYDQQLKAGDNPYLKYNHADAEFQERLKEDTSFGGNLGRAVFQAKKRLLEPLGLVEEAAKTAPGKKRPVEQSPQEPDSSAGIGKSGAQPAKKRLNFGQTGDTESVPDPQPIGEPPAAPSGVGSLTMASCGGAPVADNNEGADGVGSSSGNWHCDSQWLGDRVITTSTRTWALPTYNNHLYKQISNSTSGGSSNDNAYFGYSTPWGYFDFNRFHCHFSPRDWQRLINNNWGFRPKRLNFKLFNIQVKEVTDNNGVKTIANNLTSTVQVFTDSDYQLPYVLGSAHEGCLPPFPADVFMIPQYGYLTLNDGSQAVGRSSFYCLEYFPSQMLRTGNNFQFSYEFENVPFHSSYAHSQSLDRLMNPLIDQYLYYLSKTINGSGQNQQTLKFSVAGPSNMAVQGRNYIPGPSYRQQRVSTTVTQNNNSEFAWPGASSWALNGRNSLMNPGPAMASHKEGEDRFFPLSGSLIFGKQGTGRDNVDADKVMITNEEEIKTTNPVATESYGQVATNHQSAQAQAQTGWVQNQGILPGMVWQDRDVYLQGPIWAKIPHTDGNFHPSPLMGGFGMKHPPPQILIKNTPVPADPPTAFNKDKLNSFITQYSTGQVSVEIEWELQKENSKRWNPEIQYTSNYYKSNNVEFAVNTEGVYSEPRPIGTRYLTRNL

SEQ ID NO: 10 - protein, 736 aa, synthetic construct
MAADGYLPDWLEDNLSEGIREWWALKPGAPQPKANQQHQDNARGLVLPGYKYLGPGNGLDKGEPINAADAAALEHDKAYDQQLKAGDNPYLKYNHADAEFQERLKEDTSFGGNLGRAVFQAKKRLLEPLGLVEEAAKTAPGKKRPVEQSPQEPDSSAGIGKSGAQPAKKRLNFGQTGDTESVPDPQPIGEPPAAPSGVGSLTMASGGGAPVADNNEGADGVGSSSGNWHCDSQWLGDRVITTSTRTWALPTYNNHLYKQISNSTSGGSSNDNAYFGYSTPWGYFDFNRFHCHFSPRDWQRLINNNWGFRPKRLNFKLFNIQVKEVTDNNGVKTIANNLTSTVQVFTDSDYQLPYVLGSAHEGCLPPFPADVFMIPQYGYLTLNDGSQAVGRSSFYCLEYFPSQMLRTGNNFQFSYEFENVPFHSSYAHSQSLDRLMNPLIDQYLYYLSKTINGSGQNQQTLKFSVAGPSNMAVQGRNYIPGPSYRQQRVSTTVTQNNNSEFAWPGASSWALNGRNSLMNPGPAMASHKEGEDRFFPLSGSLIFGKQGTGRDNVDADKVMITNEEEIKTTNPVATESYGQVATNHQSAQAQAQTGWVQNQGILPGMVWQDRDVYLQGPIWAKIPHTYGNFHPSPLMGGFGMKHPPPQILIKNTPVPADPPTAFNKDKLNSFITQYSTGQVSVEIEWELQKENSKRWNPEIQYTSNYYKSNNVEFAVNTEGVYSEPRPIGTRYLTRNL

SEQ ID NO: 11 - protein, 736 aa, synthetic construct
MAADGYLPDWLEDNLSEGIREWWALKPGAPQPKANQQHQDNARGLVLPGYKYLGPGNGLDKGEPVNAADAAALEHDKAYDQQLKAGDNPYLKYNHADAEFQERLKEDTSFGGNLGRAVFQAKKRLLEPLGLVEEAAKTAPGKKRPVEQSPQEPDSSAGIGKSGAQPAKKRLNFGQTGDTESVPDPQPIGEPPAAPSGVGSLTMASGGGAPVADNNEGADGVGSSSGNWHCDSQWLGDRVITTSTRTWALPTYNNHLYKQISNSTSGGSSNDNAYFGYSTPWGYFDFNRFHCHFSPHDWQRLINNNWGFRPKRLNFKLFNIQVKEVTDNNGVKTIANNLTSTVQVFTDSDYQLPYVLGSAHEGCLPPFPADVFMIPQYGYLTLNDGSQAVGRSSFYCLEYFPSQMLRTGNNFQFSYEFENVPFHSSYAHSQSLDRLMNPLIDQYLYYLSKTINGSGQNQQTLKFNVAGPSNMAVQGRNYIPGPSYRQQRVSTTVTQNNNSEFAWPRASSWALNGRNSLMNPGPAMASHKEGEDRFFPLSGSLIFGKQGTGRDNVDADKVMITNEEEIKTTNPVATESYGQVATNHQSAQAQAQTGWVQNQGILPGMVWQDRDVYLQGPIWAKIPHTDGNFHPSPLMGGFGMKHPPPQILIKNTPVPADPPTAFNKDKLNSFITQYSTGQVSMEIEWELQKENSKRWNPEIQYTSNYYKSNNVEFAVNTEGVYSEPRPIGTRYLTRNL

SEQ ID NO: 12 - protein, 736 aa, synthetic construct
MAADGYLPDWLEDNLSEGIREWWALKPGAPQPKANQQHQDNARGLVLPGYKYLGPGNGLDKGEPVNAADAAALEHDKAYDQQLKAGDNPYLKYNHADAEFQERLKEDTSFGGNLGRAVFQAKKRLLEPLGLVEEAAKTAPGKKRPVEQSPQEPDSSAGIGKSGAQPAKKRLNFGQTGDTESVPDPQPIGEPPAAPSGVGSLTMASGGGAPVADNNEGADGVGSSSGNWHCDSQWLGDRVITTSTRTWALPTYNNHLYKQISNSTSGGSSNDNAYFGYSTPWGYFDFNRFHCHFSPRDWQRLINNNWGFRPKRLNFKLFNIQVKEVTDNNGVKTIANNLTSTVQVFTDSDYQLPYVLGSAHEGCLPPFPADVFMIPQYGYLTLNDGSQAVGRSSFYCLEYFPSQMLRTGNNFQFSYEFENVPFHSSYAHSQSLDRLMNPLIDQYLYYLSKTINGSGQNQQTLKFSVAGPSNMAVQGRNYIPGPSYRQQRVSTTVTQNNNSEFAWPRASSWALNGRNSLMNPGPAMASHKEGEDRFFPLSGSLIFGKQGTGRDNVDADKVMITNEEEIKTTNPVATESYGQVATNHQSAQAQAQTGWVQNQGILPGMVWQDRDVYLQGPIWAKIPHTDGNFHPSPLMGGFGMKHPPPQILIKNTPVPADPPTAFNKDKLNSFITQYSTGQVSVEIEWERQKENSKRWNPEIQYTSNYYKSNNVEFAVNTEGVYSEPRPIGTRYLTRNL

SEQ ID NO: 13 - protein, 736 aa, synthetic construct
MAADGYLPDWLEDNLSEGIREWWALKPGAPQPKANQQHQDNARGLVLPGYKYLGPGNGLDKGEPVNAADAAALEHDKAYDQQLKAGDNPYLKYNHADAEFQERLKEDTSFGGNLGRAVFQAKKRLLEPLGLVEEAAKTAPGKKRPVEQSPQEPDSSAGIGKSGAQPAKKRLNFGQTGDTESVPDPQPIGEPPAAPSGVGSLTMASGGGAPVADNNEGADGVGSSSGNWHCDSQWLGDRVITTSTRTWALPTYNNHLYKQISNSTSGGSSNDNAYFGYSTPWGYFDFNRFHCHFSPRDWQRLINNNWGFRPKRLNFKLFNIQVKEVTDNNGVKTIANNLTSTVQVFADSDYQLPYVLGSAHEGCLPPFPADVFMIPQYGYLTLNDGSQAVGRSSFYCLEYFPSQMLRTGNNFQFSYEFENVPFHSSYAHSQSLDRLMNPLIDQYLYYLSKTINGSGQNQQTLKFSVAGPSNMAVQGRNYIPGPSYRQQRVSTTVTQNNNSEFAWPRASSWALNGRNSLMNPGPAMASHKEGEDRFFPLSGSLIFGKQGTGRDNVDADKVMITNEEEIKTTNPVATESYGQVATNHQSAQAQAQTGWVQNQGILPGMVWQDRDVYLQGPIWAKIPHTDGNFHPSPLMGGFGMKHPPPQILIKNTPVPADPPTAFNKDKLNSFITQYSTGQVSVEIEWELQKENSKRWNPEIQYTSNYYKSNNVEFAVNTEGVYSEPRPIGTRYLTRNL

SEQ ID NO: 14 - protein, 736 aa, synthetic construct
MAADGYLPDWLEDNLSEGIREWWALKPGAPQPKANQQHQDNARGLVLPGYKYLGPGNGLDKGEPVNAADAAALEHDKAYDQQLKAGDNPYLKYNHADAEFQERLKEDTSFGGNLGRAVFQAKKRLLEPLGLVEEAAKTAPGKKRPVEQSPQEPDSSAGIGKSGAQPAKKRLNFGQTGDTESVPDPQPIGEPPAAPSGVGSLTMASGGGAPVADNNEGADGVGSSSGNWHCDSQWLGDRVITTSTRTWALPTYNNHLYKQISNSTSGGSSNDNAYFGYSTPWGYFDFNRFHCHFSPRDWQRLINNNWGFRPKRLNFKLFNIQVKEVTDNNGVKTIANNLTSTVQVFTDSDYQLPYVLGSAHEGCLPPFPADVFMIPQYGYLTLNDGSQAVGRSSFYCLEYFPSQMLRTGNNFQFSYEFENVPFHSSYAHSQSLDRLMNPLIDQYLYYLSKTINGSGQNQQTLKFSVAGPSNMAVQGRNYIPGPSYRQQRVSTTVTQNNNSEIAWPRASSWALNGRNSLMNPGPAMASHKEGEDRFFPLSGSLIFGKQGTGRDNVDADKVMITNEEEIKTTNPVATESYGQVATNHQSAQAQAQTGWVQNQGILPGMVWQDRDVYLQGPIWAKIPHTDGNFHPSPLMGGFGMKHPPPQILIKNTPVPADPPTAFNKDKLNSFITQYSTGQVSVEIEWELQKENSKRWNPEIQYTSNYCKSNNVEFAVNTEGVYSEPRPIGTRYLTRNL

SEQ ID NO: 15 - protein, 736 aa, synthetic construct
MAADGYLPDWLEDNLSEGIREWWALKPGAPQPKANQQHQDNARGLVLPGYKYLGPGNGLDKGEPVNAADAAALEHDKAYDQQLKAGDNPYLKYNHADAEFQERLKEDTSFGGNLGRAVFQAKKRLLEPLGLVEEAAKTAPGKKRPVEQSPQEPDSSAGIGKSGAQPAKKRLNFGQTGDTESVPDPQPIGEPPAAPSGVGSLTMASGGGAPVADNNEGADGVGSSSGNWHCDSQWLGDRVITTSTRTWALPTYNNHLYKQISNSTSGGSSNDNAYFGYSTPWGYFDFNRFHCHFSPRDWQRLINNNWGFRPKRLNFKLFNIQVKEVTDNNGVKTIANNLTSTVQVFTDSDYQLPYVLGSAHEGCLPPFPADVFMIPQYGYLTLNDGSQAVGRSSFYCLEYFPSQMLRTGNNFQFSYEFENVPFHSSYAHSQSLDRLMNPLIDQYLYYLSKTINGSGQNQQTLKFSVAGPSNMAVQGRNYIPGPSYRQQRVSTTVTQNNNSEFAWPRASSWALNGRNSLMNPGPAMASHKEGEDRFFPLSGSLIFGKQGTGRDNVDADKVMITNEEEIKTTNPVATESYGQVATNHQSAQAQAQTGWVQNQGILPGMVWQDRDVYLQGPIWAKIPHTDGNFHPSPLMGGFGMKHPPPQILIKNTPVPADPPTAFNKDKLNSFITQYSTGQVSVEIEWELQKENSKRWNPEIQYTSNYYKSNNVEFAVNTEGVYSEPRPIGTRYLTRNL

SEQ ID NO: 16 - protein, 736 aa, synthetic construct
MSRVVMSFVDHPPDWLKEAAGGLREFLDLEPGAPKPKPNQQKQDQRGLVLPGYKYLGPFNGLDKGQPVNKADEVAREHDLEYNKLLEAGDNPYLKYNHADQEFQEKLEGDTSFGGNLGRAVFQAKKRVLEPFGLAEEAPAKTAPGKKRPRPIEPPPSSENSVDEDLVERQAQRQRLGFQDGPGNSANQVQQQPAANMASAEVAAGSGGPMGDNAQGADGVGSSSGNWHCDSLWMGDRVMRFPWMGDRVITKSTRTWSLPTYNNHLYKQINSNSDVTDEKYFGYSTPWGYFDFNRFHCHFSPRDWQRLINNHWGMRPKRLNFKLFNIQVKEVTTNDGTTTIANNLTSTVQIFADSEYQLPYVLGNAHEGCLPPFPADVFMLPQYGYLTLNDGNQVIPQSSFYCLEYFPSQMLRTGNNFSFSYEFENVPFHSMFMHNQSLDRLMNPLMDQYLWYLTATNGVQLHFKKSKKGAFASQFRNWLPGPNQRRQQWSKGAGNNNAQTNLWSYKNKYRIMNRDSVAAPGLAQAAADGFITADGQLIFSNAGQQSDEAAGAKPPTTLLITDESETRPTNPGANTKWGEVADNQQTSSTAPTMAIDNEAHIFPGMVWQDRDIYLQGPIWAKIPETDGHFHPSPLMGGFGLRNPPPQILIKNTPVPANPPETFNANKINSFITQYSTGQVTVEIEWELKKEHSKRWNPEVQYTSNFASADSLQFTVNGEGVYIEDRPIGTRYLSHNI

SEQ ID NO: 17 - protein, 735 aa, synthetic construct [sequence omitted]

SEQ ID NO: 18 - protein, 736 aa, synthetic construct
MAADGYLPDWLEDNLSEGIREWWALKPGVPQPKANQQHQDNRRGLVLPGYKYLGPGNGLDKGEPVNEADAAALEHDKAYDQQLKAGDNPYLKYNHADAEFQERLQEDTSFGGNLGRAVFQAKKRILEPLGLVEEAAKTAPGKKRPVDQSPQEPDSSSGVGKSGKQPARKRLNFGQTGDSESVPDPQPLGEPPAAPTSLGSNTMASGGGAPMADNNEGADGVGNSSGNWHCDSQWLGDRVITTSTRTWALPTYNNHLYKQISSQSGASNDNHYFGYSTPWGYFDFNRFHCHFSPRDWQRLINNNWGFRPKKLSFKLFNIQVKEVTQNDGTTTIANNLTSTVQVFTDSEYQLPYVLGSAHQGCLPPFPADVFMVPQYGYLTLNNGSQAVGRSSFYCLEYFPSQMLRTGNNFQFSYTFEDVPFHSSYAHSQSLDRLMNPLIDQYLYYLNRTQGTTSGTTNQSRLLFSQAGPQSMSLQARNWLPGPCYRQQRLSKTANDNNNSNFPWTAASKYHLNGRDSLVNPGPAMASHKDDEEKFFPMHGNLIFGKEGTTASNAELDNVMITDEEEIRTTNPVATEQYGTVANNLQSSNTAPTTRTVNDQGALPGMVWQDRDVYLQGPIWAKIPHTDGHFHPSPLMGGFGLKHPPPQIMIKNTPVPANPPTTFSPAKFASFITQYSTGQVSVEIEWELQKENSKRWNPEIQYTSNYNKSVNVDFTVDTNGVYSEPRPIGTRYLTRNL

SEQ ID NO: 19 - protein, 724 aa, synthetic construct
MSFVDHPPDWLEEVGEGLREFLGLEAGPPKPKPNQQHQDQARGLVLPGYNYLGPGNGLDRGEPVNRADEVAREHDISYNEQLEAGDNPYLKYNHADAEFQEKLADDTSFGGNLGKAVFQAKKRVLEPFGLVEEGAKTAPTGKRIDDHFPKRKKARTEEDSKPSTSSDAEAGPSGSQQLQIPAQPASSLGADTMSAGGGGPLGDNNQGADGVGNASGDWHCDSTWMGDRVVTKSTRTWVLPSYNNHQYREIKSGSVDGSNANAYFGYSTPWGYFDFNRFHSHWSPRDWQRLINNYWGFRPRSLRVKIFNIQVKEVTVQDSTTTIANNLTSTVQVFTDDDYQLPYVVGNGTEGCLPAFPPQVFTLPQYGYATLNRDNTENPTERSSFFCLEYFPSKMLRTGNNFEFTYNFEEVPFHSSFAPSQNLFKLANPLVDQYLYRFVSTNNTGGVQFNKNLAGRYANTYKNWFPGPMGRTQGWNLGSGVNRASVSAFATTNRMELEGASYQVPPQPNGMTNNLQGSNTYALENTMIFNSQPANPGTTATYLEGNMLITSESETQPVNRVAYNVGGQMATNNQSSTTAPATGTYNLQEIVPGSVWMERDVYLQGPIWAKIPETGAHFHPSPAMGGFGLKHPPPMMLIKNTPVPGNITSFSDVPVSSFITQYSTGQVTVEMEWELKKENSKRWNPEIQYTNNYNDPQFVDFAPDSTGEYRTTRPIGTRYLTRPL

SEQ ID NO: 20 - protein, 736 aa, synthetic construct
MAADGYLPDWLEDNLSEGIREWWDLKPGAPKPKANQQKQDDGRGLVLPGYKYLGPFNGLDKGEPVNAADAAALEHDKAYDQQLKAGDNPYLRYNHADAEFQERLQEDTSFGGNLGRAVFQAKKRVLEPFGLVEEGAKTAPGKKRPVEQSPQEPDSSSGIGKTGQQPAKKRLNFGQTGDSESVPDPQPLGEPPATPAAVGPTTMASGGGAPMADNNEGADGVGNASGNWHCDSTWLGDRVITTSTRTWALPTYNNHLYKQISSASTGASNDNHYFGYSTPWGYFDFNRFHCHFSPRDWQRLINNNWGFRPKRLNFKLFNIQVKEVTTNDGVTTIANNLTSTVQVFSDSEYQLPYVLGSAHQGCLPPFPADVFMIPQYGYLTLNNGSQAVGRSSFYCLEYFPSQMLRTGNNFTFSYTFEDVPFHSSYAHSQSLDRLMNPLIDQYLYYLNRTQNQSGSAQNKDLLFSRGSPAGMSVQPKNWLPGPCYRQQRVSKTKTDNNNSNFTWTGASKYNLNGRESIINPGTAMASHKDDKDKFFPMSGVMIFGKESAGASNTALDNVMITDEEEIKATNPVATERFGTVAVNLQSSSTDPATGDVHVMGALPGMVWQDRDVYLQGPIWAKIPHTDGHFHPSPLMGGFGLKHPPPQILIKNTPVPANPPAEFSATKFASFITQYSTGQVSVEIEWELQKENSKRWNPEVQYTSNYAKSANVDFTVDNNGLYTEPRPIGTRYLTRPL

SEQ ID NO: 21 - protein, 738 aa, synthetic construct
MAADGYLPDWLEDNLSEGIREWWALKPGAPKPKANQQKQDDGRGLVLPGYKYLGPFNGLDKGEPVNAADAAALEHDKAYDQQLQAGDNPYLRYNHADAEFQERLQEDTSFGGNLGRAVFQAKKRVLEPLGLVEEGAKTAPGKKRPVEPSPQRSPDSSTGIGKKGQQPARKRLNFGQTGDSESVPDPQPLGEPPAAPSGVGPNTMAAGGGAPMADNNEGADGVGSSSGNWHCDSTWLGDRVITTSTRTWALPTYNNHLYKQISNGTSGGATNDNTYFGYSTPWGYFDFNRFHCHFSPRDWQRLINNNWGFRPKRLSFKLFNIQVKEVTQNEGTKTIANNLTSTIQVFTDSEYQLPYVLGSAHQGCLPPFPADVFMIPQYGYLTLNNGSQAVGRSSFYCLEYFPSQMLRTGNNFQFTYTFEDVPFHSSYAHSQSLDRLMNPLIDQYLYYLSRTQTTGGTANTQTLGFSQGGPNTMANQAKNWLPGPCYRQQRVSTTTGQNNNSNFAWTAGTKYHLNGRNSLANPGIAMATHKDDEERFFPSNGILIFGKQNAARDNADYSDVMLTSEEEIKTTNPVATEEYGIVADNLQQQNTAPQIGTVNSQGALPGMVWQNRDVYLQGPIWAKIPHTDGNFHPSPLMGGFGLKHPPPQILIKNTPVPADPPTTFNQSKLNSFITQYSTGQVSVEIEWELQKENSKRWNPEIQYTSNYYKSTSVDFAVNTEGVYSEPRPIGTRYLTRNL

SEQ ID NO: 22 - protein, 736 aa, synthetic construct
MAADGYLPDWLEDNLSEGIREWWALKPGAPQPKANQQHQDNARGLVLPGYKYLGPGNGLDKGEPVNAADAAALEHDKAYDQQLKAGDNPYLKYNHADAEFQERLKEDTSFGGNLGRAVFQAKKRLLEPLGLVEEAAKTAPGKKRPVEQSPQEPDSSAGIGKSGAQPAKKRLNFGQTGDTESVPDPQPIGEPPAAPSGVGSLTMASGGGAPVADNNEGADGVGSSSGNWHCDSQWLGDRVITTSTRTWALPTYNNHLYKQISNSTSGGSSNDNAYFGYSTPWGYFDFNRFHCHFSPRDWQRLINNNWGFRPKRLNFKLFNIQVKEVTDNNGVKTIANNLTSTVQVFTDSDYQLPYVLGSAHEGCLPPFPADVFMIPQYGYLTLNDGSQAVGRSSFYCLEYFPSQMLRTGNNFQFSYEFENVPFHSSYAHSQSLDRLMNPLIDQYLYYLSKTINGSGQNQQTLKFSVAGPSNMAVQGRNYIPGPSYRQQRVSTTVTQNNNSEFAWPGASSWALNGRNSLMNPGPAMASHKEGEDRFFPLSGSLIFGKQGTGRDNVDADKVMITNEEEIKTTNPVATESYGQVATNHQSAQAQAQTGWVQNQGILPGMVWQDRDVYLQGPIWAKIPHTDGNFHPSPLMGGFGMKHPPPQILIKNTPVPADPPTAFNKDKLNSFITQYSTGQVSVEIEWELQKENSKRWNPEIQYTSNYYKSNNVEFAVNTEGVYSEPRPIGTRYLTRNL

SEQ ID NO: 23 - protein, 736 aa, synthetic construct
MAADGYLPDWLEDTLSEGIRQWWKLKPGPPPPKPAERHKDDSRGLVLPGYKYLGPGNGLDKGEPVNAADAAALEHDKAYDQQLKAGDNPYLKYNHADAEFQERLKEDTSFGGNLGRAVFQAKKRLLEPLGLVEEAAKTAPGKKRPVEQSPQEPDSSAGIGKSGSQPAKKKLNFGQTGDTESVPDPQPIGEPPAAPSGVGSLTMASGGGAPVADNNEGADGVGSSSGNWHCDSQWLGDRVITTSTRTWALPTYNNHLYKQISNSTSGGSSNDNAYFGYSTPWGYFDFNRFHCHFSPRDWQRLINNNWGFRPKRLNFKLFNIQVKEVTDNNGVKTIANNLTSTVQVFTDSDYQLPYVLGSAHEGCLPPFPADVFMIPQYGYLTLNDGSQAVGRSSFYCLEYFPSQMLRTGNNFQFSYEFENVPFHSSYAHSQSLDRLMNPLIDQYLYYLSKTINGSGQNQQTLKFSVAGPSNMAVQGRNYIPGPSYRQQRVSTTVTQNNNSEFAWPGASSWALNGRNSLMNPGPAMASHKEGEDRFFPLSGSLIFGKQGTGRDNVDADKVMITNEEEIKTTNPVATESYGQVATNHQSAQAQAQTGWVQNQGILPGMVWQDRDVYLQGPIWAKIPHTDGNFHPSPLMGGFGMKHPPPQILIKNTPVPADPPTAFNKDKLNSFITQYSTGQVSVEIEWELQKENSKRWNPEIQYTSNYYKSNNVEFAVNTEGVYSEPRPIGTRYLTRNL

SEQ ID NO: 24 - protein, 738 aa, synthetic construct
MAADGYLPDWLEDNLSEGIREWWDLKPGAPKPKANQQKQDDGRGLVLPGYKYLGPFNGLDKGEPVNAADAAALEHDKAYDQQLKAGDNPYLRYNHADAEFQERLQEDTSFGGNLGRAVFQAKKRVLEPLGLVEEAAKTAPGKKRPVEPSPQRSPDSSTGIGKKGQQPAKKRLNFGQTGDSESVPDPQPIGEPPAGPSGLGSGTMAAGGGAPMADNNEGADGVGSSSGNWHCDSTWLGDRVITTSTRTWALPTYNNHLYKQISNGTSGGSTNDNTYFGYSTPWGYFDFNRFHCHFSPRDWQRLINNNWGFRPKRLSFKLFNIQVKEVTQNEGTKTIANNLTSTIQVFTDSEYQLPYVLGSAHQGCLPPFPADVFMIPQYGYLTLNNGSQAVGRSSFYCLEYFPSQMLRTGNNFEFSYTFEDVPFHSSYAHSQSLDRLMNPLIDQYLYYLSRTQSTGGTQGTQQLLFSQAGPANMSAQAKNWLPGPCYRQQRVSTTLSQNNNSNFAWTGATKYHLNGRDSLVNPGVAMATHKDDEERFFPSSGVLMFGKQGAGRDNVDYSSVMLTSEEEIKTTNPVATEQYGVVADNLQQTNTGPIVGNVNSQGALPGMVWQNRDVYLQGPIWAKIPHTDGNFHPSPLMGGFGLKHPPPQILIKNTPVPADPPTTFSQAKLASFITQYSTGQVSVEIEWELQKENSKRWNPEIQYTSNYYKSTNVDFAVNTEGTYSEPRPIGTRYLTRNL

SEQ ID NO: 25 - protein, 729 aa, synthetic construct
MAADGYLPDWLEDNLSEGIREWWDLKPGAPKPKANQQKQDNGRGLVLPGYKYLGPFNGLDKGEPVAADAAALEHDKAYDQQLQAGDNPYLRYHADAEFQERLQEDTSFGGNLGRAVFQAKKRVLEPLGLVESPVKTAPGKKRPVEPSPQRSPDSSTGIGKKGQQPAKKRLNFGQTGDSESVPDPQPIGEPPAGPSGLGSGTMAAGGGAPMADNNEGADGVGSSSGNWHCDSTWLGDRVITTSTRTWALPTYNNHLYKQISNGTSGGSTNDNTYFGYSTPWGYFDFNRFHCHFSPRDWQRLINNNWGFRPKRLNFLFNIQVKEVTQNEGTKTIANNLTSTIQVFTDSEYQLPYVLGSAHQGCLPPFPADVFMIPQYGYLTLNNGSQAVGRSSFYCLEYFPSQMLRTGNFEFSYFEDVPFHSSYAHSQSLDRLMNPLIDQYLYYLSRTQSTGGTAGTQQLLFSQAGPNNMSAQAKNWLPGPCYRQQRVSTTLSQNNNSNFAWTGATKYHLNGRDSLVNPGVAMATHDDEERFFPSSGVLMFGKQGAGDNVDYSSVMLTSEEEIKTTNPVATEQYGWADNLQQQNAAPIVGAVSQGALPGMVWQNRDVYLQGPIWAKIPHTDGNFHPSPLMGGFGLKHPPPQILIKNTPVPADPPTTFNQAKLASFITQYSTGQVSVEIEWELQKENSKRWNPEIQYTSNYYKSTNVDFAVNTEGTYSEPRPIGTRYLTRNL

SEQ ID NO: 26 - protein, 737 aa, synthetic construct
MAADGYLPDWLEDTLSEGIRQWWKLKPGPPPPKPAERHKDDSRGLVLPGYKYLGPFNGLDKGEPVNEADAAALEHDKAYDRQLDSGDNPYLKYNHADAEFQERLKEDTSFGGNLGRAVFQAKKRLLEPLGLVEEAAKTAPGKKRPVEHSPVEPDSSSGTGKAGQQPARKRLNFGQTGDADSVPDPQPIGEPPAAPSGVGSLTMAAGGGAPMADNNEGADGVGNSSGNWHCDSTWMGDRVITTSTRTWALPTYNNHLYKQISNSTSGGSSNDNAYFGYSTPWGYFDFNRFHCHFSPRDWQRLINNNWGFRPKRLSFKLFNIQVKEVTQNEGTKTIANNLTSTIQVFTDSEYQLPYVLGSAHQGCLPPFPADVFMIPQYGYLTLNNGSQAVGRSSFYCLEYFPSQMLRTGNNFQFTYTFEDVPFHSSYAHSQSLDRLMNPLIDQYLYYLSRTQTTGGTTNTQTLGFSQGGPNTMANQAKNWLPGPCYRQQRVSKTSADNNNSEYSWTGATKYHLNGRDSLVNPGPAMASHKDDEEKFFPQSGVLIFGKQGSEKTNVDIEKVMITDEEEIRTTNPVATEQYGSVSTNLQRGNRQAATADVNTQGVLPGMVWQDRDVYLQGPIWAKIPHTDGHFHPSPLMGGFGLKHPPPQILIKNTPVPADPPTTFNQSKLNSFITQYSTGQVSVEIEWELQKENSKRWNPEIQYTSNYYKSTSVDFAVNTEGVYSEPRPIGTRYLTRNL

SEQ ID NO: 27 - protein, 736 aa, synthetic construct
MAADGYLPDWLEDNLSEGIREWWDLKPGAPKPKANQQKQDDGRGLVLPGYKYLGPFNGLDKGEPVNAADAAALEHDKAYDQQLKAGDNPYLRYNHADAEFQERLQEDTSFGGNLGRAVFQAKKRVLEPLGLVEEGAKTAPGKKRPVEQSPQEPDSSSGIGKKGQQPARKRLNFGQTGDSESVPDPQPLGEPPAAPSGVGSNTMAAGGGAPMADNNEGADGVGNASGNWHCDSTWLGDRVITTSTRTWALPTYNNHLYKQISSQSGGSTNDNTYFGYSTPWGYFDFNRFHCHFSPRDWQRLINNNWGFRPKKLNFKLFNIQVKEVTTNDGTTTIANNLTSTVQVFTDSEYQLPYVLGSAHQGCLPPFPADVFMIPQYGYLTLNNGSQAVGRSSFYCLEYFPSQMLRTGNNFQFSYTFEDVPFHSSYAHSQSLDRLMNPLIDQYLYYLSRTQTTSGTAGNRTLQFSQAGPSSMANQAKNWLPGPCYRQQRVSKTTNQNNNSNFAWTGATKYHLNGRDSLVNPGPAMATHKDDEDKFFPMSGVLIFGKQGAGNSNVDLDNVMITNEEEIKTTNPVATEEYGTVATNLQSANTAPATGTVNSQGALPGMVWQDRDVYLQGPIWAKIPHTDGHFHPSPLMGGFGLKHPPPQILIKNTPVPANPPTTFSPAKFASFITQYSTGQVSVEIEWELQKENSKRWNPEIQYTSNYNKSTNVDFAVDTNGVYSEPRPIGTRYLTRNL

SEQ ID NO: 28 - protein, 737 aa, synthetic construct
MAADGYLPDWLEDTLSEGIRQWWKLKPGPPPPKPAERHKDDSRGLVLPGYKYLGPFNGLDKGEPVNEADAAALEHDKAYDRQLDSGDNPYLKYNHADAEFQERLKEDTSFGGNLGRAVFQAKKRLLEPLGLVEEAAKTAPGKKRPVEQSPQEPDSSSGIGKTGQQPAKKRLNFGQTGDTESVPDPQPIGEPPAAPSGVGSLTMASGGGAPVADNNEGADGVGSSSGNWHCDSQWLGDRVITTSTRTWALPTYNNHLYKQISNGTSGGATNDNTYFGYSTPWGYFDFNRFHCHFSPRDWQRLINNNWGFRPKRLSFKLFNIQVKEVTQNEGTKTIANNLTSTVQVFTDSEYQLPYVLGSAHQGCLPPFPADVFMIPQYGYLTLNNGSQAVGRSSFYCLEYFPSQMLRTGNNFQFTYTFEDVPFHSSYAHSQSLDRLMNPLIDQYLYYLSRTQTTGGTANTQTLGFSQGGPNTMANQAKNWLPGPCYRQQRVSTTTGQNNNSNFAWTAGTKYHLNGRNSLANPGIAMATHKDDKERFFPSNGILIFGKQNAARDNADYSDVMLTSEEEIKTTNPVATEEYGIVADNLQQQNTAPQIGTVNSQGALPGMVWQNRDVYLQGPIWAKIPHTDGNFHPSPLMGGFGLKHPPPQILIKNTPVPADPPTTFNQSKLNSFITQYSTGQVSVEIEWELQKENSKRWNPEIQYTSNYYKSTSVDFAVNTEGVYSEPHPIGTRYLTRPL

SEQ ID NO: 29 - protein, 738 aa, synthetic construct
MAADGYLPDWLEDNLSEGIREWWDLKPGAPKPKANQQKQDDGRGLVLPGYKYLGPFNGLDKGEPVNAADAAALEHDKAYDQQLKAGDNPYLRYNHADAEFQERLQEDTSFGGNLGRAVFQAKKRVLEPLGLVEEGAKTAPGKKRPVEPSPQRSPDSSTGIGKKGQQPAKKRLNFGQTGDSESVPDPQPIGEPPAGPSGLGSGTMAAGGGAPMADNNEGADGVGSSSGNWHCDSTWLGDRVITTSTRTWALPTYNNHLYKQISNGTSGGSTNDNTYFGYSTPWGYFDFNRFHCHFSPRDWQRLINNNWGFRPKRLNFKLFNIQVKEVTQNEGTKTIANNLTSTIQVFTDSEYQLPYVLGSAHQGCLPPFPADVFMIPQYGYLTLNNGSQAVGRSSFYCLEYFPSQMLRTGNNFEFSYQFEDVPFHSSYAHSQSLDRLMNPLIDQYLYYLSRTQSTGGTAGTQQLLFSQAGPNNMSAQAKNWLPGPCYRQQRVSTTLSQNNNSNFAWTGATKYHLNGRDSLVNPGVAMATHKDDEERFFPSSGVLMFGKQGAGKDNVDYSSVMLTSEEEIKTTNPVATEQYGVVADNLQQQNAAPIVGAVNSQGALPGMVWQNRDVYLQGPIWAKIPHTDGNFHPSPLMGGFGLKHPPPQILIKNTPVPADPPTTFSQAKLASFITQYSTGQVSVEIEWELQKENSKRWNPEIQYTSNYYKSTNVDFAVNTDGTYSEPRPIGTRYLTRNL

SEQ ID NO: 30 - protein, 736 aa, synthetic construct
MAADGYLPDWLEDNLSEGIREWWALQPGAPKPKANQQHQDNARGLVLPGYKYLGPGNGLDKGEPVNAADAAALEHDKAYDQQLKAGDNPYLKYNHADAEFQERLKEDTSFGGNLGRAVFQAKKRLLEPLGLVEEAAKTAPGKKRPVDQSPQEPDSSSGVGKSGKQPARKRLNFGQTGDSESVPDPQPLGEPPAAPTSLGSNTMASGGGAPMADNNEGADGVGNSSGNWHCDSQWLGDRVITTSTRTWALPTYNNHLYKQISSQSGASNDNHYFGYSTPWGYFDFNRFHCHFSPRDWQRLINNNWGFRPKKLSFKLFNIQVKEVTQNDGTTTIANNLTSTVQVFTDSEYQLPYVLGSAHQGCLPPFPADVFMVPQYGYLTLNNGSQAVGRSSFYCLEYFPSQMLRTGNNFQFSYTFEDVPFHSSYAHSQSLDRLMNPLIDQYLYYLNRTQGTTSGTTNQSRLLFSQAGPQSMSLQARNWLPGPCYRQQRLSKTANDNNNSNFPWTAASKYHLNGRDSLVNPGPAMASHKDDEEKFFPMHGNLIFGKEGTTASNAELDNVMITDEEEIRTTNPVATEQYGTVANNLQSSNTAPTTRTVNDQGALPGMVWQDRDVYLQGPIWAKIPHTDGHFHPSPLMGGFGLKHPPPQIMIKNTPVPANPPTTFSPAKFASFITQYSTGQVSVEIEWELQKENSKRWNPEIQYTSNYNKSVNVDFTVDTNGVYSEPRPIGTRYLTRPL

SEQ ID NO: 31 - protein, 736 aa, synthetic construct
MTADGYLPDWLEDNLSEGIREWWALKPGAPQPKANQQHQDNARGLVLPGYKYLGPGNGLDKGEPVNAADAAALEHDKAYDQQLKAGDNPYLKYNHADAEFQERLKEDTSFGGNLGRAVFQAKKRLLEPLGLVEEAAKTAPGKKRPVEQSPQEPDSSAGIGKSGAQPAKKRLNFGQTGDTESVPDPQPIGEPPAAPSGVGSLTMASGGGAPVADNNEGADGVGSSSGNWHCDSQWLGDRVITTSTRTWALPTYNNHLYKQISNSTSGGSSNDNAYFGYSTPWGYFDFNRFHCHFSPRDWQRLINNNWGFRPKQLNFKLFNIQVKEVTDNNGVKTIANNLTSTVQVFTDSDYQLPYVLGSAHEGCLPPFPADVFMIPQYGYLTLNDGSQAVGRSSFYCLEYFPSQMLRTGNNFQFSYEFENVPFHSSYAHSQSLDRLMNPLIDQYLYYLSKTINGSGQNQQTLKFSVAGPSNMAVQGRNYIPGPSYRQQRVSTTVTQNNNSEIAWPGASSWALNGRNSLMNPGPAMASHKEGEDRFFPLSGSLIFGKQGTGRDNVDADKVMITNEEEIKTTNPVATESYGQVATNHQSAQAQAQTGWVQNQGILPGMVWQDRDVYLQGPIWAKIPHTDGNFHPSPLMGGFGMKHPPPQILIKNTPVPADPPTAFNKDKLNSFITQYSTGQVSVEIEWELQKENSKRWNPEIQYTSNYYKSNNVEFAVNTEGVYSEPRPIGTRYLTRNL

SEQ ID NO: 32 - protein, 736 aa, synthetic construct
MTADGYLPDWLEDNLSEGIREWWALKPGAPQPKANQQHQDNARGLVLPGYKYLGPGNGLDKGEPVNAADAAALEHDKAYDQQLKAGDNPYLKYNHADAEFQERLKEDTSFGGNLGRAVFQAKKRLLEPLGLVEEAAKTAPGKKRPVEQSPQEPDSSAGIGKSGAQPAKKRLNFGQTGDTESVPDPQPIGEPPAAPSGVGSLTMASGGGAPVADNNEGADGVGSSSGNWHCDSQWLGDRVITTSTRTWALPTYNNHLYKQISNSTSGGSSNDNAYFGYSTPWGYFDFNRFHCHFSPRDWQRLINNNWGFRPKQLNFKLFNIQVKEVTDNNGVKTIANNLTSTVQVFTDSDYQLPYVLGSAHEGCLPPFPADVFMIPQYGYLTLNDGSQAVGRSSFYCLEYFPSQMLRTGNNFQFSYEFENVPFHSSYAHSQSLDRLMNPLIDQYLYYLSKTINGSGQNQQTLKFSVAGPSNMAVQGRNYIPGPSYRQQRVSTTVTQNNNSEFAWPRASSWALNGRNSLMNPGPAMASHKEGEDRFFPLSGSLIFGKQGTGRDNVDADKVMITNEEEIKTTNPVATESYGQVATNHQSAQAQAQTGWVQNQGILPGMVWQDRDVYLQGPIWAKIPHTDGNFHPSPLMGGFGMKHPPPQILIKNTPVPADPPTAFNKDKLNSFITQYSTGQVSVEIEWELQKENSKRWNPEIQYTSNYYKSNNVEFAVNTEGVYSEPRPIGTRYLTRNL

SEQ ID NO: 33 - protein, 736 aa, synthetic construct
MTADGYLPDWLEDNLSEGIREWWALKPGAPQPKANQQHQDNARGLVLPGYKYLGPGNGLDKGEPVNAADAAALEHDKAYDQQLKAGDNPYLKYNHADAEFQERLKEDTSFGGNLGRAVFQAKKRLLEPLGLVEEAAKTAPGKKRPVEQSPQEPDSSAGIGKSGAQPAKKRLNFGQTGDTESVPDPQPIGEPPAAPSGVGSLTMASGGGAPVADNNEGADGVGSSSGNWHCDSQWLGDRVITTSTRTWALPTYNNHLYKQISNSTSGGSSNDNAYFGYSTPWGYFDFNRFHCHFSPRDWQRLINNNWGFRPKQLNFKLFNIQVKEVTDNNGVKTIANNLTSTVQVFTDSDYQLPYVLGSAHEGCLPPFPADVFMIPQYGYLTLNDGSQAVGRSSFYCLEYFPSQMLRTGNNFQFSYEFENVPFHSSYAHSQSLDRLMNPLIDQYLYYLSKTINGSGQNQQTLKFSVAGPSNMAVQGRNYIPGPSYRQQRVSTTVTQNNNSEFAWPGASSWALNGRNSLMNPGPAMASHKEGEDRFFPLSGSLIFGKQGTGRDNVDADKVMITNEEEIKTTNPVATESYGQVATNHQSAQAQAQTGWVQNQGILPGMVWQDRDVYLQGPIWAKIPHTDGNFHPSPLMGGFGMKHPPPQILIKNTPVPADPPTAFNKDKLNSFITQYSTGQVSVEIEWELQKENSKRWNPEIQYTSNYCKSNNVEFAVNTEGVYSEPRPIGTRYLTRNL

SEQ ID NO: 34 - protein, 736 aa, synthetic construct
MTADGYLPDWLEDNLSEGIREWWALKPGAPQPKANQQHQDNARGLVLPGYKYLGPGNGLDKGEPVNAADAAALEHDKAYDQQLKAGDNPYLKYNHADAEFQERLKEDTSFGGNLGRAVFQAKKRLLEPLGLVEEAAKTAPGKKRPVEQSPQEPDSSAGIGKSGAQPAKKRLNFGQTGDTESVPDPQPIGEPPAAPSGVGSLTMASGGGAPVADNNEGADGVGSSSGNWHCDSQWLGDRVITTSTRTWALPTYNNHLYKQISNSTSGGSSNDNAYFGYSTPWGYFDFNRFHCHFSPRDWQRLINNNWGFRPKQLNFKLFNIQVKEVTDNNGVKTIANNLTSTVQVFTDSDYQLPYVLGSAHEGCLPPFPADVFMIPQYGYLTLNDGSQAVGRSSFYCLEYFPSQMLRTGNNFQFSYEFENVPFHSSYAHSQSLDRLMNPLIDQYLYYLSKTINGSGQNQQTLKFSVAGPSNMAVQGRNYIPGPSYRQQRVSTTVTQNNNSEIAWPRASSWALNGRNSLMNPGPAMASHKEGEDRFFPLSGSLIFGKQGTGRDNVDADKVMITNEEEIKTTNPVATESYGQVATNHQSAQAQAQTGWVQNQGILPGMVWQDRDVYLQGPIWAKIPHTDGNFHPSPLMGGFGMKHPPPQILIKNTPVPADPPTAFNKDKLNSFITQYSTGQVSVEIEWELQKENSKRWNPEIQYTSNYYKSNNVEFAVNTEGVYSEPRPIGTRYLTRNL

SEQ ID NO: 35 - protein, 736 aa, synthetic construct
MTADGYLPDWLEDNLSEGIREWWALKPGAPQPKANQQHQDNARGLVLPGYKYLGPGNGLDKGEPVNAADAAALEHDKAYDQQLKAGDNPYLKYNHADAEFQERLKEDTSFGGNLGRAVFQAKKRLLEPLGLVEEAAKTAPGKKRPVEQSPQEPDSSAGIGKSGAQPAKKRLNFGQTGDTESVPDPQPIGEPPAAPSGVGSLTMASGGGAPVADNNEGADGVGSSSGNWHCDSQWLGDRVITTSTRTWALPTYNNHLYKQISNSTSGGSSNDNAYFGYSTPWGYFDFNRFHCHFSPRDWQRLINNNWGFRPKQLNFKLFNIQVKEVTDNNGVKTIANNLTSTVQVFTDSDYQLPYVLGSAHEGCLPPFPADVFMIPQYGYLTLNDGSQAVGRSSFYCLEYFPSQMLRTGNNFQFSYEFENVPFHSSYAHSQSLDRLMNPLIDQYLYYLSKTINGSGQNQQTLKFSVAGPSNMAVQGRNYIPGPSYRQQRVSTTVTQNNNSEIAWPGASSWALNGRNSLMNPGPAMASHKEGEDRFFPLSGSLIFGKQGTGRDNVDADKVMITNEEEIKTTNPVATESYGQVATNHQSAQAQAQTGWVQNQGILPGMVWQDRDVYLQGPIWAKIPHTDGNFHPSPLMGGFGMKHPPPQILIKNTPVPADPPTAFNKDKLNSFITQYSTGQVSVEIEWELQKENSKRWNPEIQYTSNYCKSNNVEFAVNTEGVYSEPRPIGTRYLTRNL

SEQ ID NO: 36 - protein, 736 aa, synthetic construct
MTADGYLPDWLEDNLSEGIREWWALKPGAPQPKANQQHQDNARGLVLPGYKYLGPGNGLDKGEPVNAADAAALEHDKAYDQQLKAGDNPYLKYNHADAEFQERLKEDTSFGGNLGRAVFQAKKRLLEPLGLVEEAAKTAPGKKRPVEQSPQEPDSSAGIGKSGAQPAKKRLNFGQTGDTESVPDPQPIGEPPAAPSGVGSLTMASGGGAPVADNNEGADGVGSSSGNWHCDSQWLGDRVITTSTRTWALPTYNNHLYKQISNSTSGGSSNDNAYFGYSTPWGYFDFNRFHCHFSPRDWQRLINNNWGFRPKQLNFKLFNIQVKEVTDNNGVKTIANNLTSTVQVFTDSDYQLPYVLGSAHEGCLPPFPADVFMIPQYGYLTLNDGSQAVGRSSFYCLEYFPSQMLRTGNNFQFSYEFENVPFHSSYAHSQSLDRLMNPLIDQYLYYLSKTINGSGQNQQTLKFSVAGPSNMAVQGRNYIPGPSYRQQRVSTTVTQNNNSEFAWPRASSWALNGRNSLMNPGPAMASHKEGEDRFFPLSGSLIFGKQGTGRDNVDADKVMITNEEEIKTTNPVATESYGQVATNHQSAQAQAQTGWVQNQGILPGMVWQDRDVYLQGPIWAKIPHTDGNFHPSPLMGGFGMKHPPPQILIKNTPVPADPPTAFNKDKLNSFITQYSTGQVSVEIEWELQKENSKRWNPEIQYTSNYCKSNNVEFAVNTEGVYSEPRPIGTRYLTRNL

SEQ ID NO: 37 - protein, 736 aa, synthetic construct
MTADGYLPDWLEDNLSEGIREWWALKPGAPQPKANQQHQDNARGLVLPGYKYLGPGNGLDKGEPVNAADAAALEHDKAYDQQLKAGDNPYLKYNHADAEFQERLKEDTSFGGNLGRAVFQAKKRLLEPLGLVEEAAKTAPGKKRPVEQSPQEPDSSAGIGKSGAQPAKKRLNFGQTGDTESVPDPQPIGEPPAAPSGVGSLTMASGGGAPVADNNEGADGVGSSSGNWHCDSQWLGDRVITTSTRTWALPTYNNHLYKQISNSTSGGSSNDNAYFGYSTPWGYFDFNRFHCHFSPRDWQRLINNNWGFRPKQLNFKLFNIQVKEVTDNNGVKTIANNLTSTVQVFTDSDYQLPYVLGSAHEGCLPPFPADVFMIPQYGYLTLNDGSQAVGRSSFYCLEYFPSQMLRTGNNFQFSYEFENVPFHSSYAHSQSLDRLMNPLIDQYLYYLSKTINGSGQNQQTLKFSVAGPSNMAVQGRNYIPGPSYRQQRVSTTVTQNNNSEIAWPRASSWALNGRNSLMNPGPAMASHKEGEDRFFPLSGSLIFGKQGTGRDNVDADKVMITNEEEIKTTNPVATESYGQVATNHQSAQAQAQTGWVQNQGILPGMVWQDRDVYLQGPIWAKIPHTDGNFHPSPLMGGFGMKHPPPQILIKNTPVPADPPTAFNKDKLNSFITQYSTGQVSVEIEWELQKENSKRWNPEIQYTSNYCKSNNVEFAVNTEGVYSEPRPIGTRYLTRNL

SEQ ID NO: 38 - protein, 736 aa, synthetic construct
MTADGYLPDWLEDNLSEGIREWWALKPGAPQPKANQQHQDNARGLVLPGYKYLGPGNGLDKGEPVNAADAAALEHDKAYDQQLKAGDNPYLKYNHADAEFQERLKEDTSFGGNLGRAVFQAKKRLLEPLGLVEEAAKTAPGKKRPVEQSPQEPDSSAGIGKSGAQPAKKRLNFGQTGDTESVPDPQPIGEPPAAPSGVGSLTMASGGGAPVADNNEGADGVGSSSGNWHCDSQWLGDRVITTSTRTWALPTYNNHLYKQISNSTSGGSSNDNAYFGYSTPWGYFDFNRFHCHFSPRDWQRLINNNWGFRPKQLNFKLFNIQVKEVTDNNGVKTIANNLTSTVQVFADSDYQLPYVLGSAHEGCLPPFPADVFMIPQYGYLTLNDGSQAVGRSSFYCLEYFPSQMLRTGNNFQFSYEFENVPFHSSYAHSQSLDRLMNPLIDQYLYYLSKTINGSGQNQQTLKFSVAGPSNMAVQGRNYIPGPSYRQQRVSTTVTQNNNSEFAWPGASSWALNGRNSLMNPGPAMASHKEGEDRFFPLSGSLIFGKQGTGRDNVDADKVMITNEEEIKTTNPVATESYGQVATNHQSAQAQAQTGWVQNQGILPGMVWQDRDVYLQGPIWAKIPHTDGNFHPSPLMGGFGMKHPPPQILIKNTPVPADPPTAFNKDKLNSFITQYSTGQVSVEIEWELQKENSKRWNPEIQYTSNYYKSNNVEFAVNTEGVYSEPRPIGTRYLTRNL

SEQ ID NO: 39 - protein, 736 aa, synthetic construct
MTADGYLPDWLEDNLSEGIREWWALKPGAPQPKANQQHQDNARGLVLPGYKYLGPGNGLDKGEPVNAADAAALEHDKAYDQQLKAGDNPYLKYNHADAEFQERLKEDTSFGGNLGRAVFQAKKRLLEPLGLVEEAAKTAPGKKRPVEQSPQEPDSSAGIGKSGAQPAKKRLNFGQTGDTESVPDPQPIGEPPAAPSGVGSLTMASGGGAPVADNNEGADGVGSSSGNWHCDSQWLGDRVITTSTRTWALPTYNNHLYKQISNSTSGGSSNDNAYFGYSTPWGYFDFNRFHCHFSPRDWQRLINNNWGFRPKQLNFKLFNIQVKEVTDNNGVKTIANNLTSTVQVFADSDYQLPYVLGSAHEGCLPPFPADVFMIPQYGYLTLNDGSQAVGRSSFYCLEYFPSQMLRTGNNFQFSYEFENVPFHSSYAHSQSLDRLMNPLIDQYLYYLSKTINGSGQNQQTLKFSVAGPSNMAVQGRNYIPGPSYRQQRVSTTVTQNNNSEIAWPGASSWALNGRNSLMNPGPAMASHKEGEDRFFPLSGSLIFGKQGTGRDNVDADKVMITNEEEIKTTNPVATESYGQVATNHQSAQAQAQTGWVQNQGILPGMVWQDRDVYLQGPIWAKIPHTDGNFHPSPLMGGFGMKHPPPQILIKNTPVPADPPTAFNKDKLNSFITQYSTGQVSVEIEWELQKENSKRWNPEIQYTSNYYKSNNVEFAVNTEGVYSEPRPIGTRYLTRNL

SEQ ID NO: 40 - protein, 736 aa, synthetic construct
MTADGYLPDWLEDNLSEGIREWWALKPGAPQPKANQQHQDNARGLVLPGYKYLGPGNGLDKGEPVNAADAAALEHDKAYDQQLKAGDNPYLKYNHADAEFQERLKEDTSFGGNLGRAVFQAKKRLLEPLGLVEEAAKTAPGKKRPVEQSPQEPDSSAGIGKSGAQPAKKRLNFGQTGDTESVPDPQPIGEPPAAPSGVGSLTMASGGGAPVADNNEGADGVGSSSGNWHCDSQWLGDRVITTSTRTWALPTYNNHLYKQISNSTSGGSSNDNAYFGYSTPWGYFDFNRFHCHFSPRDWQRLINNNWGFRPKQLNFKLFNIQVKEVTDNNGVKTIANNLTSTVQVFADSDYQLPYVLGSAHEGCLPPFPADVFMIPQYGYLTLNDGSQAVGRSSFYCLEYFPSQMLRTGNNFQFSYEFENVPFHSSYAHSQSLDRLMNPLIDQYLYYLSKTINGSGQNQQTLKFSVAGPSNMAVQGRNYIPGPSYRQQRVSTTVTQNNNSEFAWPRASSWALNGRNSLMNPGPAMASHKEGEDRFFPLSGSLIFGKQGTGRDNVDADKVMITNEEEIKTTNPVATESYGQVATNHQSAQAQAQTGWVQNQGILPGMVWQDRDVYLQGPIWAKIPHTDGNFHPSPLMGGFGMKHPPPQILIKNTPVPADPPTAFNKDKLNSFITQYSTGQVSVEIEWELQKENSKRWNPEIQYTSNYYKSNNVEFAVNTEGVYSEPRPIGTRYLTRNL

SEQ ID NO: 41 - protein, 736 aa, synthetic construct
MTADGYLPDWLEDNLSEGIREWWALKPGAPQPKANQQHQDNARGLVLPGYKYLGPGNGLDKGEPVNAADAAALEHDKAYDQQLKAGDNPYLKYNHADAEFQERLKEDTSFGGNLGRAVFQAKKRLLEPLGLVEEAAKTAPGKKRPVEQSPQEPDSSAGIGKSGAQPAKKRLNFGQTGDTESVPDPQPIGEPPAAPSGVGSLTMASGGGAPVADNNEGADGVGSSSGNWHCDSQWLGDRVITTSTRTWALPTYNNHLYKQISNSTSGGSSNDNAYFGYSTPWGYFDFNRFHCHFSPRDWQRLINNNWGFRPKQLNFKLFNIQVKEVTDNNGVKTIANNLTSTVQVFADSDYQLPYVLGSAHEGCLPPFPADVFMIPQYGYLTLNDGSQAVGRSSFYCLEYFPSQMLRTGNNFQFSYEFENVPFHSSYAHSQSLDRLMNPLIDQYLYYLSKTINGSGQNQQTLKFSVAGPSNMAVQGRNYIPGPSYRQQRVSTTVTQNNNSEFAWPGASSWALNGRNSLMNPGPAMASHKEGEDRFFPLSGSLIFGKQGTGRDNVDADKVMITNEEEIKTTNPVATESYGQVATNHQSAQAQAQTGWVQNQGILPGMVWQDRDVYLQGPIWAKIPHTDGNFHPSPLMGGFGMKHPPPQILIKNTPVPADPPTAFNKDKLNSFITQYSTGQVSVEIEWELQKENSKRWNPEIQYTSNYCKSNNVEFAVNTEGVYSEPRPIGTRYLTRNL

SEQ ID NO: 42 - protein, 736 aa, synthetic construct
MTADGYLPDWLEDNLSEGIREWWALKPGAPQPKANQQHQDNARGLVLPGYKYLGPGNGLDKGEPVNAADAAALEHDKAYDQQLKAGDNPYLKYNHADAEFQERLKEDTSFGGNLGRAVFQAKKRLLEPLGLVEEAAKTAPGKKRPVEQSPQEPDSSAGIGKSGAQPAKKRLNFGQTGDTESVPDPQPIGEPPAAPSGVGSLTMASGGGAPVADNNEGADGVGSSSGNWHCDSQWLGDRVITTSTRTWALPTYNNHLYKQISNSTSGGSSNDNAYFGYSTPWGYFDFNRFHCHFSPRDWQRLINNNWGFRPKQLNFKLFNIQVKEVTDNNGVKTIANNLTSTVQVFADSDYQLPYVLGSAHEGCLPPFPADVFMIPQYGYLTLNDGSQAVGRSSFYCLEYFPSQMLRTGNNFQFSYEFENVPFHSSYAHSQSLDRLMNPLIDQYLYYLSKTINGSGQNQQTLKFSVAGPSNMAVQGRNYIPGPSYRQQRVSTTVTQNNNSEIAWPRASSWALNGRNSLMNPGPAMASHKEGEDRFFPLSGSLIFGKQGTGRDNVDADKVMITNEEEIKTTNPVATESYGQVATNHQSAQAQAQTGWVQNQGILPGMVWQDRDVYLQGPIWAKIPHTDGNFHPSPLMGGFGMKHPPPQILIKNTPVPADPPTAFNKDKLNSFITQYSTGQVSVEIEWELQKENSKRWNPEIQYTSNYYKSNNVEFAVNTEGVYSEPRPIGTRYLTRNL

SEQ ID NO: 43 - protein, 736 aa, synthetic construct
MTADGYLPDWLEDNLSEGIREWWALKPGAPQPKANQQHQDNARGLVLPGYKYLGPGNGLDKGEPVNAADAAALEHDKAYDQQLKAGDNPYLKYNHADAEFQERLKEDTSFGGNLGRAVFQAKKRLLEPLGLVEEAAKTAPGKKRPVEQSPQEPDSSAGIGKSGAQPAKKRLNFGQTGDTESVPDPQPIGEPPAAPSGVGSLTMASGGGAPVADNNEGADGVGSSSGNWHCDSQWLGDRVITTSTRTWALPTYNNHLYKQISNSTSGGSSNDNAYFGYSTPWGYFDFNRFHCHFSPRDWQRLINNNWGFRPKQLNFKLFNIQVKEVTDNNGVKTIANNLTSTVQVFADSDYQLPYVLGSAHEGCLPPFPADVFMIPQYGYLTLNDGSQAVGRSSFYCLEYFPSQMLRTGNNFQFSYEFENVPFHSSYAHSQSLDRLMNPLIDQYLYYLSKTINGSGQNQQTLKFSVAGPSNMAVQGRNYIPGPSYRQQRVSTTVTQNNNSEIAWPGASSWALNGRNSLMNPGPAMASHKEGEDRFFPLSGSLIFGKQGTGRDNVDADKVMITNEEEIKTTNPVATESYGQVATNHQSAQAQAQTGWVQNQGILPGMVWQDRDVYLQGPIWAKIPHTDGNFHPSPLMGGFGMKHPPPQILIKNTPVPADPPTAFNKDKLNSFITQYSTGQVSVEIEWELQKENSKRWNPEIQYTSNYCKSNNVEFAVNTEGVYSEPRPIGTRYLTRNL

SEQ ID NO: 44 - protein, 736 aa, synthetic construct
MTADGYLPDWLEDNLSEGIREWWALKPGAPQPKANQQHQDNARGLVLPGYKYLGPGNGLDKGEPVNAADAAALEHDKAYDQQLKAGDNPYLKYNHADAEFQERLKEDTSFGGNLGRAVFQAKKRLLEPLGLVEEAAKTAPGKKRPVEQSPQEPDSSAGIGKSGAQPAKKRLNFGQTGDTESVPDPQPIGEPPAAPSGVGSLTMASGGGAPVADNNEGADGVGSSSGNWHCDSQWLGDRVITTSTRTWALPTYNNHLYKQISNSTSGGSSNDNAYFGYSTPWGYFDFNRFHCHFSPRDWQRLINNNWGFRPKQLNFKLFNIQVKEVTDNNGVKTIANNLTSTVQVFADSDYQLPYVLGSAHEGCLPPFPADVFMIPQYGYLTLNDGSQAVGRSSFYCLEYFPSQMLRTGNNFQFSYEFENVPFHSSYAHSQSLDRLMNPLIDQYLYYLSKTINGSGQNQQTLKFSVAGPSNMAVQGRNYIPGPSYRQQRVSTTVTQNNNSEFAWPRASSWALNGRNSLMNPGPAMASHKEGEDRFFPLSGSLIFGKQGTGRDNVDADKVMITNEEEIKTTNPVATESYGQVATNHQSAQAQAQTGWVQNQGILPGMVWQDRDVYLQGPIWAKIPHTDGNFHPSPLMGGFGMKHPPPQILIKNTPVPADPPTAFNKDKLNSFITQYSTGQVSVEIEWELQKENSKRWNPEIQYTSNYCKSNNVEFAVNTEGVYSEPRPIGTRYLTRNL

SEQ ID NO: 45 - protein, 736 aa, synthetic construct
MTADGYLPDWLEDNLSEGIREWWALKPGAPQPKANQQHQDNARGLVLPGYKYLGPGNGLDKGEPVNAADAAALEHDKAYDQQLKAGDNPYLKYNHADAEFQERLKEDTSFGGNLGRAVFQAKKRLLEPLGLVEEAAKTAPGKKRPVEQSPQEPDSSAGIGKSGAQPAKKRLNFGQTGDTESVPDPQPIGEPPAAPSGVGSLTMASGGGAPVADNNEGADGVGSSSGNWHCDSQWLGDRVITTSTRTWALPTYNNHLYKQISNSTSGGSSNDNAYFGYSTPWGYFDFNRFHCHFSPRDWQRLINNNWGFRPKQLNFKLFNIQVKEVTDNNGVKTIANNLTSTVQVFADSDYQLPYVLGSAHEGCLPPFPADVFMIPQYGYLTLNDGSQAVGRSSFYCLEYFPSQMLRTGNNFQFSYEFENVPFHSSYAHSQSLDRLMNPLIDQYLYYLSKTINGSGQNQQTLKFSVAGPSNMAVQGRNYIPGPSYRQQRVSTTVTQNNNSEIAWPRASSWALNGRNSLMNPGPAMASHKEGEDRFFPLSGSLIFGKQGTGRDNVDADKVMITNEEEIKTTNPVATESYGQVATNHQSAQAQAQTGWVQNQGILPGMVWQDRDVYLQGPIWAKIPHTDGNFHPSPLMGGFGMKHPPPQILIKNTPVPADPPTAFNKDKLNSFITQYSTGQVSVEIEWELQKENSKRWNPEIQYTSNYCKSNNVEFAVNTEGVYSEPRPIGTRYLTRNL

SEQ ID NO: 46 - protein, 736 aa, synthetic construct
MAADGYLPDWLEDNLSEGIREWWALKPGAPQPKANQQHQDNARGLVLPGYKYLGPGNGLDKGEPVNAADAAALEHDKAYDQQLKAGDNPYLKYNHADAEFQERLKEDTSFGGNLGRAVFQAKKRLLEPLGLVEEAAKTAPGKKRPVEQSPQEPDSSAGIGKSGAQPAKKRLNFGQTGDTESVPDPQPIGEPPAAPSGVGSLTMASGGGAPVADNNEGADGVGSSSGNWHCDSQWLGDRVITTSTRTWALPTYNNHLYKQISNSTSGGSSNDNAYFGYSTPWGYFDFNRFHCHFSPRDWQRLINNNWGFRPKRLNFKLFNIQVKEVTDNNGVKTIANNLTSTVQVFTDSDYQLPYVLGSAHEGCLPPFPADVFMIPQYGYLTLNDGSQAVGRSSFYCLEYFPSQMLRTGNNFQFSYEFENVPFHSSYAHSQSLDRLMNPLIDQYLYYLSKTINGSGQNQQTLKFSVAGPSNMAVQGRNYIPGPSYRQQRVSTTVTQNNNSEIAWPGASSWALNGRNSLMNPGPAMASHKEGEDRFFPLSGSLIFGKQGTGRDNVDADKVMITNEEEIKTTNPVATESYGQVATNHQSAQAQAQTGWVQNQGILPGMVWQDRDVYLQGPIWAKIPHTGGNFHPSPLMGGFGMKHPPPQILIKNTPVPADPPTAFNKDKLNSFITQYSTGQVSVEIEWELQKENSKRWNPEIQYTSNYYKSNNVEFAVNTGGVYSEPRPIGTRYLTRNL

SEQ ID NO: 47 - protein, 736 aa, synthetic construct
MAADGYLPDWLEDNLSEGIREWWALKPGAPQPKANQQHQDNARGLVLPGYKYLGPGNGLDKGEPVNAADAAALEHDKAYDQQLKAGDNPYLKYNHADAEFQERLKEDTSFGGNLGRAVFQAKKRLLEPLGLVEEAAKTAPGKKRPVEQSPQEPDSSAGIGKSGAQPAKKRLNFGQTGDTESVPDPQPIGEPPAAPSGVGSLTMASGGGAPVADNNEGADGVGSSSGNWHCDSQWLGDRVITTSTRTWALPTYNNHLYKQISNSTSGGSSNDNAYFGYSTPWGYFDFNRFHCHFSPRDWQRLINNNWGFRPKRLNFKLFNIQVKEVTDNNGVKTIANNLTSTVQVFTDSDYQLPYVLGSAHEGCLPPFPADVFMIPQYGYLTLNDGSQAVGRSSFYCLEYFPSQMLRTGNNFQFSYEFENVPFHSSYAHSQSLDRLMNPLIDQYLYYLSKTINGSGQNQQTLKFSVAGPSNMAVQGRNYIPGPSYRQQRVSTTVTQNNNSEFAWPRASSWALNGRNSLMNPGPAMASHKEGEDRFFPLSGSLIFGKQGTGRDNVDADKVMITNEEEIKTTNPVATESYGQVATNHQSAQAQAQTGWVQNQGILPGMVWQDRDVYLQGPIWAKIPHTGGNFHPSPLMGGFGMKHPPPQILIKNTPVPADPPTAFNKDKLNSFITQYSTGQVSVEIEWELQKENSKRWNPEIQYTSNYYKSNNVEFAVNTGGVYSEPRPIGTRYLTRNL

SEQ ID NO: 48 - protein, 736 aa, synthetic construct
MAADGYLPDWLEDNLSEGIREWWALKPGAPQPKANQQHQDNARGLVLPGYKYLGPGNGLDKGEPVNAADAAALEHDKAYDQQLKAGDNPYLKYNHADAEFQERLKEDTSFGGNLGRAVFQAKKRLLEPLGLVEEAAKTAPGKKRPVEQSPQEPDSSAGIGKSGAQPAKKRLNFGQTGDTESVPDPQPIGEPPAAPSGVGSLTMASGGGAPVADNNEGADGVGSSSGNWHCDSQWLGDRVITTSTRTWALPTYNNHLYKQISNSTSGGSSNDNAYFGYSTPWGYFDFNRFHCHFSPRDWQRLINNNWGFRPKRLNFKLFNIQVKEVTDNNGVKTIANNLTSTVQVFTDSDYQLPYVLGSAHEGCLPPFPADVFMIPQYGYLTLNDGSQAVGRSSFYCLEYFPSQMLRTGNNFQFSYEFENVPFHSSYAHSQSLDRLMNPLIDQYLYYLSKTINGSGQNQQTLKFSVAGPSNMAVQGRNYIPGPSYRQQRVSTTVTQNNNSEFAWPGASSWALNGRNSLMNPGPAMASHKEGEDRFFPLSGSLIFGKQGTGRDNVDADKVMITNEEEIKTTNPVATESYGQVATNHQSAQAQAQTGWVQNQGILPGMVWQDRDVYLQGPIWAKIPHTGGNFHPSPLMGGFGMKHPPPQILIKNTPVPADPPTAFNKDKLNSFITQYSTGQVSVEIEWELQKENSKRWNPEIQYTSNYCKSNNVEFAVNTGGVYSEPRPIGTRYLTRNL

SEQ ID NO: 49 - protein, 736 aa, synthetic construct
MAADGYLPDWLEDNLSEGIREWWALKPGAPQPKANQQHQDNARGLVLPGYKYLGPGNGLDKGEPVNAADAAALEHDKAYDQQLKAGDNPYLKYNHADAEFQERLKEDTSFGGNLGRAVFQAKKRLLEPLGLVEEAAKTAPGKKRPVEQSPQEPDSSAGIGKSGAQPAKKRLNFGQTGDTESVPDPQPIGEPPAAPSGVGSLTMASGGGAPVADNNEGADGVGSSSGNWHCDSQWLGDRVITTSTRTWALPTYNNHLYKQISNSTSGGSSNDNAYFGYSTPWGYFDFNRFHCHFSPRDWQRLINNNWGFRPKRLNFKLFNIQVKEVTDNNGVKTIANNLTSTVQVFTDSDYQLPYVLGSAHEGCLPPFPADVFMIPQYGYLTLNDGSQAVGRSSFYCLEYFPSQMLRTGNNFQFSYEFENVPFHSSYAHSQSLDRLMNPLIDQYLYYLSKTINGSGQNQQTLKFSVAGPSNMAVQGRNYIPGPSYRQQRVSTTVTQNNNSEIAWPRASSWALNGRNSLMNPGPAMASHKEGEDRFFPLSGSLIFGKQGTGRDNVDADKVMITNEEEIKTTNPVATESYGQVATNHQSAQAQAQTGWVQNQGILPGMVWQDRDVYLQGPIWAKIPHTGGNFHPSPLMGGFGMKHPPPQILIKNTPVPADPPTAFNKDKLNSFITQYSTGQVSVEIEWELQKENSKRWNPEIQYTSNYYKSNNVEFAVNTGGVYSEPRPIGTRYLTRNL

SEQ ID NO: 50 - protein, 736 aa, synthetic construct
MAADGYLPDWLEDNLSEGIREWWALKPGAPQPKANQQHQDNARGLVLPGYKYLGPGNGLDKGEPVNAADAAALEHDKAYDQQLKAGDNPYLKYNHADAEFQERLKEDTSFGGNLGRAVFQAKKRLLEPLGLVEEAAKTAPGKKRPVEQSPQEPDSSAGIGKSGAQPAKKRLNFGQTGDTESVPDPQPIGEPPAAPSGVGSLTMASGGGAPVADNNEGADGVGSSSGNWHCDSQWLGDRVITTSTRTWALPTYNNHLYKQISNSTSGGSSNDNAYFGYSTPWGYFDFNRFHCHFSPRDWQRLINNNWGFRPKRLNFKLFNIQVKEVTDNNGVKTIANNLTSTVQVFTDSDYQLPYVLGSAHEGCLPPFPADVFMIPQYGYLTLNDGSQAVGRSSFYCLEYFPSQMLRTGNNFQFSYEFENVPFHSSYAHSQSLDRLMNPLIDQYLYYLSKTINGSGQNQQTLKFSVAGPSNMAVQGRNYIPGPSYRQQRVSTTVTQNNNSEIAWPGASSWALNGRNSLMNPGPAMASHKEGEDRFFPLSGSLIFGKQGTGRDNVDADKVMITNEEEIKTTNPVATESYGQVATNHQSAQAQAQTGWVQNQGILPGMVWQDRDVYLQGPIWAKIPHTGGNFHPSPLMGGFGMKHPPPQILIKNTPVPADPPTAFNKDKLNSFITQYSTGQVSVEIEWELQKENSKRWNPEIQYTSNYCKSNNVEFAVNTGGVYSEPRPIGTRYLTRNL

SEQ ID NO: 51 - protein, 736 aa, synthetic construct
MAADGYLPDWLEDNLSEGIREWWALKPGAPQPKANQQHQDNARGLVLPGYKYLGPGNGLDKGEPVNAADAAALEHDKAYDQQLKAGDNPYLKYNHADAEFQERLKEDTSFGGNLGRAVFQAKKRLLEPLGLVEEAAKTAPGKKRPVEQSPQEPDSSAGIGKSGAQPAKKRLNFGQTGDTESVPDPQPIGEPPAAPSGVGSLTMASGGGAPVADNNEGADGVGSSSGNWHCDSQWLGDRVITTSTRTWALPTYNNHLYKQISNSTSGGSSNDNAYFGYSTPWGYFDFNRFHCHFSPRDWQRLINNNWGFRPKRLNFKLFNIQVKEVTDNNGVKTIANNLTSTVQVFTDSDYQLPYVLGSAHEGCLPPFPADVFMIPQYGYLTLNDGSQAVGRSSFYCLEYFPSQMLRTGNNFQFSYEFENVPFHSSYAHSQSLDRLMNPLIDQYLYYLSKTINGSGQNQQTLKFSVAGPSNMAVQGRNYIPGPSYRQQRVSTTVTQNNNSEFAWPRASSWALNGRNSLMNPGPAMASHKEGEDRFFPLSGSLIFGKQGTGRDNVDADKVMITNEEEIKTTNPVATESYGQVATNHQSAQAQAQTGWVQNQGILPGMVWQDRDVYLQGPIWAKIPHTGGNFHPSPLMGGFGMKHPPPQILIKNTPVPADPPTAFNKDKLNSFITQYSTGQVSVEIEWELQKENSKRWNPEIQYTSNYCKSNNVEFAVNTGGVYSEPRPIGTRYLTRNL

SEQ ID NO: 52 - protein, 736 aa, synthetic construct
MAADGYLPDWLEDNLSEGIREWWALKPGAPQPKANQQHQDNARGLVLPGYKYLGPGNGLDKGEPVNAADAAALEHDKAYDQQLKAGDNPYLKYNHADAEFQERLKEDTSFGGNLGRAVFQAKKRLLEPLGLVEEAAKTAPGKKRPVEQSPQEPDSSAGIGKSGAQPAKKRLNFGQTGDTESVPDPQPIGEPPAAPSGVGSLTMASGGGAPVADNNEGADGVGSSSGNWHCDSQWLGDRVITTSTRTWALPTYNNHLYKQISNSTSGGSSNDNAYFGYSTPWGYFDFNRFHCHFSPRDWQRLINNNWGFRPKRLNFKLFNIQVKEVTDNNGVKTIANNLTSTVQVFTDSDYQLPYVLGSAHEGCLPPFPADVFMIPQYGYLTLNDGSQAVGRSSFYCLEYFPSQMLRTGNNFQFSYEFENVPFHSSYAHSQSLDRLMNPLIDQYLYYLSKTINGSGQNQQTLKFSVAGPSNMAVQGRNYIPGPSYRQQRVSTTVTQNNNSEIAWPRASSWALNGRNSLMNPGPAMASHKEGEDRFFPLSGSLIFGKQGTGRDNVDADKVMITNEEEIKTTNPVATESYGQVATNHQSAQAQAQTGWVQNQGILPGMVWQDRDVYLQGPIWAKIPHTGGNFHPSPLMGGFGMKHPPPQILIKNTPVPADPPTAFNKDKLNSFITQYSTGQVSVEIEWELQKENSKRWNPEIQYTSNYCKSNNVEFAVNTGGVYSEPRPIGTRYLTRNL

SEQ ID NO: 53 - protein, 736 aa, synthetic construct
MAADGYLPDWLEDNLSEGIREWWALKPGAPQPKANQQHQDNARGLVLPGYKYLGPGNGLDKGEPVNAADAAALEHDKAYDQQLKAGDNPYLKYNHADAEFQERLKEDTSFGGNLGRAVFQAKKRLLEPLGLVEEAAKTAPGKKRPVEQSPQEPDSSAGIGKSGAQPAKKRLNFGQTGDTESVPDPQPIGEPPAAPSGVGSLTMASGGGAPVADNNEGADGVGSSSGNWHCDSQWLGDRVITTSTRTWALPTYNNHLYKQISNSTSGGSSNDNAYFGYSTPWGYFDFNRFHCHFSPRDWQRLINNNWGFRPKRLNFKLFNIQVKEVTDNNGVKTIANNLTSTVQVFADSDYQLPYVLGSAHEGCLPPFPADVFMIPQYGYLTLNDGSQAVGRSSFYCLEYFPSQMLRTGNNFQFSYEFENVPFHSSYAHSQSLDRLMNPLIDQYLYYLSKTINGSGQNQQTLKFSVAGPSNMAVQGRNYIPGPSYRQQRVSTTVTQNNNSEFAWPGASSWALNGRNSLMNPGPAMASHKEGEDRFFPLSGSLIFGKQGTGRDNVDADKVMITNEEEIKTTNPVATESYGQVATNHQSAQAQAQTGWVQNQGILPGMVWQDRDVYLQGPIWAKIPHTGGNFHPSPLMGGFGMKHPPPQILIKNTPVPADPPTAFNKDKLNSFITQYSTGQVSVEIEWELQKENSKRWNPEIQYTSNYYKSNNVEFAVNTGGVYSEPRPIGTRYLTRNL

SEQ ID NO: 54 - protein, 736 aa, synthetic construct
MAADGYLPDWLEDNLSEGIREWWALKPGAPQPKANQQHQDNARGLVLPGYKYLGPGNGLDKGEPVNAADAAALEHDKAYDQQLKAGDNPYLKYNHADAEFQERLKEDTSFGGNLGRAVFQAKKRLLEPLGLVEEAAKTAPGKKRPVEQSPQEPDSSAGIGKSGAQPAKKRLNFGQTGDTESVPDPQPIGEPPAAPSGVGSLTMASGGGAPVADNNEGADGVGSSSGNWHCDSQWLGDRVITTSTRTWALPTYNNHLYKQISNSTSGGSSNDNAYFGYSTPWGYFDFNRFHCHFSPRDWQRLINNNWGFRPKRLNFKLFNIQVKEVTDNNGVKTIANNLTSTVQVFADSDYQLPYVLGSAHEGCLPPFPADVFMIPQYGYLTLNDGSQAVGRSSFYCLEYFPSQMLRTGNNFQFSYEFENVPFHSSYAHSQSLDRLMNPLIDQYLYYLSKTINGSGQNQQTLKFSVAGPSNMAVQGRNYIPGPSYRQQRVSTTVTQNNNSEIAWPGASSWALNGRNSLMNPGPAMASHKEGEDRFFPLSGSLIFGKQGTGRDNVDADKVMITNEEEIKTTNPVATESYGQVATNHQSAQAQAQTGWVQNQGILPGMVWQDRDVYLQGPIWAKIPHTGGNFHPSPLMGGFGMKHPPPQILIKNTPVPADPPTAFNKDKLNSFITQYSTGQVSVEIEWELQKENSKRWNPEIQYTSNYYKSNNVEFAVNTGGVYSEPRPIGTRYLTRNL

SEQ ID NO: 55 - protein, 736 aa, synthetic construct
MAADGYLPDWLEDNLSEGIREWWALKPGAPQPKANQQHQDNARGLVLPGYKYLGPGNGLDKGEPVNAADAAALEHDKAYDQQLKAGDNPYLKYNHADAEFQERLKEDTSFGGNLGRAVFQAKKRLLEPLGLVEEAAKTAPGKKRPVEQSPQEPDSSAGIGKSGAQPAKKRLNFGQTGDTESVPDPQPIGEPPAAPSGVGSLTMASGGGAPVADNNEGADGVGSSSGNWHCDSQWLGDRVITTSTRTWALPTYNNHLYKQISNSTSGGSSNDNAYFGYSTPWGYFDFNRFHCHFSPRDWQRLINNNWGFRPKRLNFKLFNIQVKEVTDNNGVKTIANNLTSTVQVFADSDYQLPYVLGSAHEGCLPPFPADVFMIPQYGYLTLNDGSQAVGRSSFYCLEYFPSQMLRTGNNFQFSYEFENVPFHSSYAHSQSLDRLMNPLIDQYLYYLSKTINGSGQNQQTLKFSVAGPSNMAVQGRNYIPGPSYRQQRVSTTVTQNNNSEFAWPRASSWALNGRNSLMNPGPAMASHKEGEDRFFPLSGSLIFGKQGTGRDNVDADKVMITNEEEIKTTNPVATESYGQVATNHQSAQAQAQTGWVQNQGILPGMVWQDRDVYLQGPIWAKIPHTGGNFHPSPLMGGFGMKHPPPQILIKNTPVPADPPTAFNKDKLNSFITQYSTGQVSVEIEWELQKENSKRWNPEIQYTSNYYKSNNVEFAVNTGGVYSEPRPIGTRYLTRNL

SEQ ID NO: 56 - protein, 736 aa, synthetic construct
MAADGYLPDWLEDNLSEGIREWWALKPGAPQPKANQQHQDNARGLVLPGYKYLGPGNGLDKGEPVNAADAAALEHDKAYDQQLKAGDNPYLKYNHADAEFQERLKEDTSFGGNLGRAVFQAKKRLLEPLGLVEEAAKTAPGKKRPVEQSPQEPDSSAGIGKSGAQPAKKRLNFGQTGDTESVPDPQPIGEPPAAPSGVGSLTMASGGGAPVADNNEGADGVGSSSGNWHCDSQWLGDRVITTSTRTWALPTYNNHLYKQISNSTSGGSSNDNAYFGYSTPWGYFDFNRFHCHFSPRDWQRLINNNWGFRPKRLNFKLFNIQVKEVTDNNGVKTIANNLTSTVQVFADSDYQLPYVLGSAHEGCLPPFPADVFMIPQYGYLTLNDGSQAVGRSSFYCLEYFPSQMLRTGNNFQFSYEFENVPFHSSYAHSQSLDRLMNPLIDQYLYYLSKTINGSGQNQQTLKFSVAGPSNMAVQGRNYIPGPSYRQQRVSTTVTQNNNSEFAWPGASSWALNGRNSLMNPGPAMASHKEGEDRFFPLSGSLIFGKQGTGRDNVDADKVMITNEEEIKTTNPVATESYGQVATNHQSAQAQAQTGWVQNQGILPGMVWQDRDVYLQGPIWAKIPHTGGNFHPSPLMGGFGMKHPPPQILIKNTPVPADPPTAFNKDKLNSFITQYSTGQVSVEIEWELQKENSKRWNPEIQYTSNYCKSNNVEFAVNTGGVYSEPRPIGTRYLTRNL

SEQ ID NO: 57 - protein, 736 aa, synthetic construct
MAADGYLPDWLEDNLSEGIREWWALKPGAPQPKANQQHQDNARGLVLPGYKYLGPGNGLDKGEPVNAADAAALEHDKAYDQQLKAGDNPYLKYNHADAEFQERLKEDTSFGGNLGRAVFQAKKRLLEPLGLVEEAAKTAPGKKRPVEQSPQEPDSSAGIGKSGAQPAKKRLNFGQTGDTESVPDPQPIGEPPAAPSGVGSLTMASGGGAPVADNNEGADGVGSSSGNWHCDSQWLGDRVITTSTRTWALPTYNNHLYKQISNSTSGGSSNDNAYFGYSTPWGYFDFNRFHCHFSPRDWQRLINNNWGFRPKRLNFKLFNIQVKEVTDNNGVKTIANNLTSTVQVFADSDYQLPYVLGSAHEGCLPPFPADVFMIPQYGYLTLNDGSQAVGRSSFYCLEYFPSQMLRTGNNFQFSYEFENVPFHSSYAHSQSLDRLMNPLIDQYLYYLSKTINGSGQNQQTLKFSVAGPSNMAVQGRNYIPGPSYRQQRVSTTVTQNNNSEIAWPRASSWALNGRNSLMNPGPAMASHKEGEDRFFPLSGSLIFGKQGTGRDNVDADKVMITNEEEIKTTNPVATESYGQVATNHQSAQAQAQTGWVQNQGILPGMVWQDRDVYLQGPIWAKIPHTGGNFHPSPLMGGFGMKHPPPQILIKNTPVPADPPTAFNKDKLNSFITQYSTGQVSVEIEWELQKENSKRWNPEIQYTSNYYKSNNVEFAVNTGGVYSEPRPIGTRYLTRNL

SEQ ID NO: 58 - protein, 736 aa, synthetic construct
MAADGYLPDWLEDNLSEGIREWWALKPGAPQPKANQQHQDNARGLVLPGYKYLGPGNGLDKGEPVNAADAAALEHDKAYDQQLKAGDNPYLKYNHADAEFQERLKEDTSFGGNLGRAVFQAKKRLLEPLGLVEEAAKTAPGKKRPVEQSPQEPDSSAGIGKSGAQPAKKRLNFGQTGDTESVPDPQPIGEPPAAPSGVGSLTMASGGGAPVADNNEGADGVGSSSGNWHCDSQWLGDRVITTSTRTWALPTYNNHLYKQISNSTSGGSSNDNAYFGYSTPWGYFDFNRFHCHFSPRDWQRLINNNWGFRPKRLNFKLFNIQVKEVTDNNGVKTIANNLTSTVQVFADSDYQLPYVLGSAHEGCLPPFPADVFMIPQYGYLTLNDGSQAVGRSSFYCLEYFPSQMLRTGNNFQFSYEFENVPFHSSYAHSQSLDRLMNPLIDQYLYYLSKTINGSGQNQQTLKFSVAGPSNMAVQGRNYIPGPSYRQQRVSTTVTQNNNSEIAWPGASSWALNGRNSLMNPGPAMASHKEGEDRFFPLSGSLIFGKQGTGRDNVDADKVMITNEEEIKTTNPVATESYGQVATNHQSAQAQAQTGWVQNQGILPGMVWQDRDVYLQGPIWAKIPHTGGNFHPSPLMGGFGMKHPPPQILIKNTPVPADPPTAFNKDKLNSFITQYSTGQVSVEIEWELQKENSKRWNPEIQYTSNYCKSNNVEFAVNTGGVYSEPRPIGTRYLTRNL

SEQ ID NO: 59 - protein, 736 aa, synthetic construct
MAADGYLPDWLEDNLSEGIREWWALKPGAPQPKANQQHQDNARGLVLPGYKYLGPGNGLDKGEPVNAADAAALEHDKAYDQQLKAGDNPYLKYNHADAEFQERLKEDTSFGGNLGRAVFQAKKRLLEPLGLVEEAAKTAPGKKRPVEQSPQEPDSSAGIGKSGAQPAKKRLNFGQTGDTESVPDPQPIGEPPAAPSGVGSLTMASGGGAPVADNNEGADGVGSSSGNWHCDSQWLGDRVITTSTRTWALPTYNNHLYKQISNSTSGGSSNDNAYFGYSTPWGYFDFNRFHCHFSPRDWQRLINNNWGFRPKRLNFKLFNIQVKEVTDNNGVKTIANNLTSTVQVFADSDYQLPYVLGSAHEGCLPPFPADVFMIPQYGYLTLNDGSQAVGRSSFYCLEYFPSQMLRTGNNFQFSYEFENVPFHSSYAHSQSLDRLMNPLIDQYLYYLSKTINGSGQNQQTLKFSVAGPSNMAVQGRNYIPGPSYRQQRVSTTVTQNNNSEFAWPRASSWALNGRNSLMNPGPAMASHKEGEDRFFPLSGSLIFGKQGTGRDNVDADKVMITNEEEIKTTNPVATESYGQVATNHQSAQAQAQTGWVQNQGILPGMVWQDRDVYLQGPIWAKIPHTGGNFHPSPLMGGFGMKHPPPQILIKNTPVPADPPTAFNKDKLNSFITQYSTGQVSVEIEWELQKENSKRWNPEIQYTSNYCKSNNVEFAVNTGGVYSEPRPIGTRYLTRNL

SEQ ID NO: 60 - protein, 736 aa, synthetic construct
MAADGYLPDWLEDNLSEGIREWWALKPGAPQPKANQQHQDNARGLVLPGYKYLGPGNGLDKGEPVNAADAAALEHDKAYDQQLKAGDNPYLKYNHADAEFQERLKEDTSFGGNLGRAVFQAKKRLLEPLGLVEEAAKTAPGKKRPVEQSPQEPDSSAGIGKSGAQPAKKRLNFGQTGDTESVPDPQPIGEPPAAPSGVGSLTMASGGGAPVADNNEGADGVGSSSGNWHCDSQWLGDRVITTSTRTWALPTYNNHLYKQISNSTSGGSSNDNAYFGYSTPWGYFDFNRFHCHFSPRDWQRLINNNWGFRPKRLNFKLFNIQVKEVTDNNGVKTIANNLTSTVQVFADSDYQLPYVLGSAHEGCLPPFPADVFMIPQYGYLTLNDGSQAVGRSSFYCLEYFPSQMLRTGNNFQFSYEFENVPFHSSYAHSQSLDRLMNPLIDQYLYYLSKTINGSGQNQQTLKFSVAGPSNMAVQGRNYIPGPSYRQQRVSTTVTQNNNSEIAWPRASSWALNGRNSLMNPGPAMASHKEGEDRFFPLSGSLIFGKQGTGRDNVDADKVMITNEEEIKTTNPVATESYGQVATNHQSAQAQAQTGWVQNQGILPGMVWQDRDVYLQGPIWAKIPHTGGNFHPSPLMGGFGMKHPPPQILIKNTPVPADPPTAFNKDKLNSFITQYSTGQVSVEIEWELQKENSKRWNPEIQYTSNYCKSNNVEFAVNTGGVYSEPRPIGTRYLTRNL

SEQ ID NO: 61 - protein, 736 aa, synthetic construct
MAADGYLPDWLEDNLSEGIREWWALKPGAPQPKANQQHQDNARGLVLPGYKYLGPGNGLDKGEPVNAADAAALEHDKAYDQQLKAGDNPYLKYNHADAEFQERLKEDTSFGGNLGRAVFQAKKRLLEPLGLVEEAAKTAPGKKRPVEQSPQEPDSSAGIDKSGAQPAKKRLNFGQTGDTESVPDPQPIGEPPAAPSGVGSLTMASGGGAPVADNNEGADGVGSSSGNWHCDSQWLGDRVITTSTRTWALPTYNNHLYKQISNSTSGGSSNDNAYFGYSTPWGYFDFNRFHCHFSPRDWQRLINNNWGFRPKRLNFKLFNIQVKEVTDNNGVKTIANNLTSTVQVFTDSDYQLPYVLGSAHEGCLPPFPADVFMIPQYGYLTLNDGSQAVGRSSFYCLEYFPSQMLRTGNNFQFSYEFENVPFHSSYAHSQSLDRLMNPLIDQYLYYLSKTINGSGQNQQTLKFSVAGPSNMAVQGRNYIPGPSYRQQRVSTTVTQNNNSEIAWPGASSWALNGRNSLMNPGPAMASHKEGEDRFFPLSGSLIFGKQGTGRDNVDADKVMITNEEEIKTTNPVATESYGQVATNHQSAQAQAQTGWVQNQGILPGMVWQDRDVYLQGPIWAKIPHTDGNFHPSPLMGGFGMKHPPPQILIKNTPVPADPPTAFNKDKLNSFITQYSTGQVSVEIEWELQKENSKRWNPEIQYTSNYYKSNNVEFAVNTEGVYSEPRPIGTRYLTRNL

SEQ ID NO: 62 - protein, 736 aa, synthetic construct
MAADGYLPDWLEDNLSEGIREWWALKPGAPQPKANQQHQDNARGLVLPGYKYLGPGNGLDKGEPVNAADAAALEHDKAYDQQLKAGDNPYLKYNHADAEFQERLKEDTSFGGNLGRAVFQAKKRLLEPLGLVEEAAKTAPGKKRPVEQSPQEPDSSAGIDKSGAQPAKKRLNFGQTGDTESVPDPQPIGEPPAAPSGVGSLTMASGGGAPVADNNEGADGVGSSSGNWHCDSQWLGDRVITTSTRTWALPTYNNHLYKQISNSTSGGSSNDNAYFGYSTPWGYFDFNRFHCHFSPRDWQRLINNNWGFRPKRLNFKLFNIQVKEVTDNNGVKTIANNLTSTVQVFTDSDYQLPYVLGSAHEGCLPPFPADVFMIPQYGYLTLNDGSQAVGRSSFYCLEYFPSQMLRTGNNFQFSYEFENVPFHSSYAHSQSLDRLMNPLIDQYLYYLSKTINGSGQNQQTLKFSVAGPSNMAVQGRNYIPGPSYRQQRVSTTVTQNNNSEFAWPRASSWALNGRNSLMNPGPAMASHKEGEDRFFPLSGSLIFGKQGTGRDNVDADKVMITNEEEIKTTNPVATESYGQVATNHQSAQAQAQTGWVQNQGILPGMVWQDRDVYLQGPIWAKIPHTDGNFHPSPLMGGFGMKHPPPQILIKNTPVPADPPTAFNKDKLNSFITQYSTGQVSVEIEWELQKENSKRWNPEIQYTSNYYKSNNVEFAVNTEGVYSEPRPIGTRYLTRNL

SEQ ID NO: 63 - protein, 736 aa, synthetic construct
MAADGYLPDWLEDNLSEGIREWWALKPGAPQPKANQQHQDNARGLVLPGYKYLGPGNGLDKGEPVNAADAAALEHDKAYDQQLKAGDNPYLKYNHADAEFQERLKEDTSFGGNLGRAVFQAKKRLLEPLGLVEEAAKTAPGKKRPVEQSPQEPDSSAGIDKSGAQPAKKRLNFGQTGDTESVPDPQPIGEPPAAPSGVGSLTMASGGGAPVADNNEGADGVGSSSGNWHCDSQWLGDRVITTSTRTWALPTYNNHLYKQISNSTSGGSSNDNAYFGYSTPWGYFDFNRFHCHFSPRDWQRLINNNWGFRPKRLNFKLFNIQVKEVTDNNGVKTIANNLTSTVQVFTDSDYQLPYVLGSAHEGCLPPFPADVFMIPQYGYLTLNDGSQAVGRSSFYCLEYFPSQMLRTGNNFQFSYEFENVPFHSSYAHSQSLDRLMNPLIDQYLYYLSKTINGSGQNQQTLKFSVAGPSNMAVQGRNYIPGPSYRQQRVSTTVTQNNNSEFAWPGASSWALNGRNSLMNPGPAMASHKEGEDRFFPLSGSLIFGKQGTGRDNVDADKVMITNEEEIKTTNPVATESYGQVATNHQSAQAQAQTGWVQNQGILPGMVWQDRDVYLQGPIWAKIPHTDGNFHPSPLMGGFGMKHPPPQILIKNTPVPADPPTAFNKDKLNSFITQYSTGQVSVEIEWELQKENSKRWNPEIQYTSNYCKSNNVEFAVNTEGVYSEPRPIGTRYLTRNL

SEQ ID NO: 64 - protein, 736 aa, synthetic construct
MAADGYLPDWLEDNLSEGIREWWALKPGAPQPKANQQHQDNARGLVLPGYKYLGPGNGLDKGEPVNAADAAALEHDKAYDQQLKAGDNPYLKYNHADAEFQERLKEDTSFGGNLGRAVFQAKKRLLEPLGLVEEAAKTAPGKKRPVEQSPQEPDSSAGIDKSGAQPAKKRLNFGQTGDTESVPDPQPIGEPPAAPSGVGSLTMASGGGAPVADNNEGADGVGSSSGNWHCDSQWLGDRVITTSTRTWALPTYNNHLYKQISNSTSGGSSNDNAYFGYSTPWGYFDFNRFHCHFSPRDWQRLINNNWGFRPKRLNFKLFNIQVKEVTDNNGVKTIANNLTSTVQVFTDSDYQLPYVLGSAHEGCLPPFPADVFMIPQYGYLTLNDGSQAVGRSSFYCLEYFPSQMLRTGNNFQFSYEFENVPFHSSYAHSQSLDRLMNPLIDQYLYYLSKTINGSGQNQQTLKFSVAGPSNMAVQGRNYIPGPSYRQQRVSTTVTQNNNSEIAWPRASSWALNGRNSLMNPGPAMASHKEGEDRFFPLSGSLIFGKQGTGRDNVDADKVMITNEEEIKTTNPVATESYGQVATNHQSAQAQAQTGWVQNQGILPGMVWQDRDVYLQGPIWAKIPHTDGNFHPSPLMGGFGMKHPPPQILIKNTPVPADPPTAFNKDKLNSFITQYSTGQVSVEIEWELQKENSKRWNPEIQYTSNYYKSNNVEFAVNTEGVYSEPRPIGTRYLTRNL

SEQ ID NO: 65 - protein, 736 aa, synthetic construct
MAADGYLPDWLEDNLSEGIREWWALKPGAPQPKANQQHQDNARGLVLPGYKYLGPGNGLDKGEPVNAADAAALEHDKAYDQQLKAGDNPYLKYNHADAEFQERLKEDTSFGGNLGRAVFQAKKRLLEPLGLVEEAAKTAPGKKRPVEQSPQEPDSSAGIDKSGAQPAKKRLNFGQTGDTESVPDPQPIGEPPAAPSGVGSLTMASGGGAPVADNNEGADGVGSSSGNWHCDSQWLGDRVITTSTRTWALPTYNNHLYKQISNSTSGGSSNDNAYFGYSTPWGYFDFNRFHCHFSPRDWQRLINNNWGFRPKRLNFKLFNIQVKEVTDNNGVKTIANNLTSTVQVFTDSDYQLPYVLGSAHEGCLPPFPADVFMIPQYGYLTLNDGSQAVGRSSFYCLEYFPSQMLRTGNNFQFSYEFENVPFHSSYAHSQSLDRLMNPLIDQYLYYLSKTINGSGQNQQTLKFSVAGPSNMAVQGRNYIPGPSYRQQRVSTTVTQNNNSEIAWPGASSWALNGRNSLMNPGPAMASHKEGEDRFFPLSGSLIFGKQGTGRDNVDADKVMITNEEEIKTTNPVATESYGQVATNHQSAQAQAQTGWVQNQGILPGMVWQDRDVYLQGPIWAKIPHTDGNFHPSPLMGGFGMKHPPPQILIKNTPVPADPPTAFNKDKLNSFITQYSTGQVSVEIEWELQKENSKRWNPEIQYTSNYCKSNNVEFAVNTEGVYSEPRPIGTRYLTRNL

SEQ ID NO: 66 - protein, 736 aa, synthetic construct
MAADGYLPDWLEDNLSEGIREWWALKPGAPQPKANQQHQDNARGLVLPGYKYLGPGNGLDKGEPVNAADAAALEHDKAYDQQLKAGDNPYLKYNHADAEFQERLKEDTSFGGNLGRAVFQAKKRLLEPLGLVEEAAKTAPGKKRPVEQSPQEPDSSAGIDKSGAQPAKKRLNFGQTGDTESVPDPQPIGEPPAAPSGVGSLTMASGGGAPVADNNEGADGVGSSSGNWHCDSQWLGDRVITTSTRTWALPTYNNHLYKQISNSTSGGSSNDNAYFGYSTPWGYFDFNRFHCHFSPRDWQRLINNNWGFRPKRLNFKLFNIQVKEVTDNNGVKTIANNLTSTVQVFTDSDYQLPYVLGSAHEGCLPPFPADVFMIPQYGYLTLNDGSQAVGRSSFYCLEYFPSQMLRTGNNFQFSYEFENVPFHSSYAHSQSLDRLMNPLIDQYLYYLSKTINGSGQNQQTLKFSVAGPSNMAVQGRNYIPGPSYRQQRVSTTVTQNNNSEFAWPRASSWALNGRNSLMNPGPAMASHKEGEDRFFPLSGSLIFGKQGTGRDNVDADKVMITNEEEIKTTNPVATESYGQVATNHQSAQAQAQTGWVQNQGILPGMVWQDRDVYLQGPIWAKIPHTDGNFHPSPLMGGFGMKHPPPQILIKNTPVPADPPTAFNKDKLNSFITQYSTGQVSVEIEWELQKENSKRWNPEIQYTSNYCKSNNVEFAVNTEGVYSEPRPIGTRYLTRNL

SEQ ID NO: 67 - protein, 736 aa, synthetic construct
MAADGYLPDWLEDNLSEGIREWWALKPGAPQPKANQQHQDNARGLVLPGYKYLGPGNGLDKGEPVNAADAAALEHDKAYDQQLKAGDNPYLKYNHADAEFQERLKEDTSFGGNLGRAVFQAKKRLLEPLGLVEEAAKTAPGKKRPVEQSPQEPDSSAGIDKSGAQPAKKRLNFGQTGDTESVPDPQPIGEPPAAPSGVGSLTMASGGGAPVADNNEGADGVGSSSGNWHCDSQWLGDRVITTSTRTWALPTYNNHLYKQISNSTSGGSSNDNAYFGYSTPWGYFDFNRFHCHFSPRDWQRLINNNWGFRPKRLNFKLFNIQVKEVTDNNGVKTIANNLTSTVQVFTDSDYQLPYVLGSAHEGCLPPFPADVFMIPQYGYLTLNDGSQAVGRSSFYCLEYFPSQMLRTGNNFQFSYEFENVPFHSSYAHSQSLDRLMNPLIDQYLYYLSKTINGSGQNQQTLKFSVAGPSNMAVQGRNYIPGPSYRQQRVSTTVTQNNNSEIAWPRASSWALNGRNSLMNPGPAMASHKEGEDRFFPLSGSLIFGKQGTGRDNVDADKVMITNEEEIKTTNPVATESYGQVATNHQSAQAQAQTGWVQNQGILPGMVWQDRDVYLQGPIWAKIPHTDGNFHPSPLMGGFGMKHPPPQILIKNTPVPADPPTAFNKDKLNSFITQYSTGQVSVEIEWELQKENSKRWNPEIQYTSNYCKSNNVEFAVNTEGVYSEPRPIGTRYLTRNL

SEQ ID NO: 68 - protein, 736 aa, synthetic construct
MAADGYLPDWLEDNLSEGIREWWALKPGAPQPKANQQHQDNARGLVLPGYKYLGPGNGLDKGEPVNAADAAALEHDKAYDQQLKAGDNPYLKYNHADAEFQERLKEDTSFGGNLGRAVFQAKKRLLEPLGLVEEAAKTAPGKKRPVEQSPQEPDSSAGIDKSGAQPAKKRLNFGQTGDTESVPDPQPIGEPPAAPSGVGSLTMASGGGAPVADNNEGADGVGSSSGNWHCDSQWLGDRVITTSTRTWALPTYNNHLYKQISNSTSGGSSNDNAYFGYSTPWGYFDFNRFHCHFSPRDWQRLINNNWGFRPKRLNFKLFNIQVKEVTDNNGVKTIANNLTSTVQVFADSDYQLPYVLGSAHEGCLPPFPADVFMIPQYGYLTLNDGSQAVGRSSFYCLEYFPSQMLRTGNNFQFSYEFENVPFHSSYAHSQSLDRLMNPLIDQYLYYLSKTINGSGQNQQTLKFSVAGPSNMAVQGRNYIPGPSYRQQRVSTTVTQNNNSEFAWPGASSWALNGRNSLMNPGPAMASHKEGEDRFFPLSGSLIFGKQGTGRDNVDADKVMITNEEEIKTTNPVATESYGQVATNHQSAQAQAQTGWVQNQGILPGMVWQDRDVYLQGPIWAKIPHTDGNFHPSPLMGGFGMKHPPPQILIKNTPVPADPPTAFNKDKLNSFITQYSTGQVSVEIEWELQKENSKRWNPEIQYTSNYYKSNNVEFAVNTEGVYSEPRPIGTRYLTRNL

SEQ ID NO: 69 - protein, 736 aa, synthetic construct
MAADGYLPDWLEDNLSEGIREWWALKPGAPQPKANQQHQDNARGLVLPGYKYLGPGNGLDKGEPVNAADAAALEHDKAYDQQLKAGDNPYLKYNHADAEFQERLKEDTSFGGNLGRAVFQAKKRLLEPLGLVEEAAKTAPGKKRPVEQSPQEPDSSAGIDKSGAQPAKKRLNFGQTGDTESVPDPQPIGEPPAAPSGVGSLTMASGGGAPVADNNEGADGVGSSSGNWHCDSQWLGDRVITTSTRTWALPTYNNHLYKQISNSTSGGSSNDNAYFGYSTPWGYFDFNRFHCHFSPRDWQRLINNNWGFRPKRLNFKLFNIQVKEVTDNNGVKTIANNLTSTVQVFADSDYQLPYVLGSAHEGCLPPFPADVFMIPQYGYLTLNDGSQAVGRSSFYCLEYFPSQMLRTGNNFQFSYEFENVPFHSSYAHSQSLDRLMNPLIDQYLYYLSKTINGSGQNQQTLKFSVAGPSNMAVQGRNYIPGPSYRQQRVSTTVTQNNNSEIAWPGASSWALNGRNSLMNPGPAMASHKEGEDRFFPLSGSLIFGKQGTGRDNVDADKVMITNEEEIKTTNPVATESYGQVATNHQSAQAQAQTGWVQNQGILPGMVWQDRDVYLQGPIWAKIPHTDGNFHPSPLMGGFGMKHPPPQILIKNTPVPADPPTAFNKDKLNSFITQYSTGQVSVEIEWELQKENSKRWNPEIQYTSNYYKSNNVEFAVNTEGVYSEPRPIGTRYLTRNL

SEQ ID NO: 70 - protein, 736 aa, synthetic construct
MAADGYLPDWLEDNLSEGIREWWALKPGAPQPKANQQHQDNARGLVLPGYKYLGPGNGLDKGEPVNAADAAALEHDKAYDQQLKAGDNPYLKYNHADAEFQERLKEDTSFGGNLGRAVFQAKKRLLEPLGLVEEAAKTAPGKKRPVEQSPQEPDSSAGIDKSGAQPAKKRLNFGQTGDTESVPDPQPIGEPPAAPSGVGSLTMASGGGAPVADNNEGADGVGSSSGNWHCDSQWLGDRVITTSTRTWALPTYNNHLYKQISNSTSGGSSNDNAYFGYSTPWGYFDFNRFHCHFSPRDWQRLINNNWGFRPKRLNFKLFNIQVKEVTDNNGVKTIANNLTSTVQVFADSDYQLPYVLGSAHEGCLPPFPADVFMIPQYGYLTLNDGSQAVGRSSFYCLEYFPSQMLRTGNNFQFSYEFENVPFHSSYAHSQSLDRLMNPLIDQYLYYLSKTINGSGQNQQTLKFSVAGPSNMAVQGRNYIPGPSYRQQRVSTTVTQNNNSEFAWPRASSWALNGRNSLMNPGPAMASHKEGEDRFFPLSGSLIFGKQGTGRDNVDADKVMITNEEEIKTTNPVATESYGQVATNHQSAQAQAQTGWVQNQGILPGMVWQDRDVYLQGPIWAKIPHTDGNFHPSPLMGGFGMKHPPPQILIKNTPVPADPPTAFNKDKLNSFITQYSTGQVSVEIEWELQKENSKRWNPEIQYTSNYYKSNNVEFAVNTEGVYSEPRPIGTRYLTRNL

SEQ ID NO: 71 - protein, 736 aa, synthetic construct
MAADGYLPDWLEDNLSEGIREWWALKPGAPQPKANQQHQDNARGLVLPGYKYLGPGNGLDKGEPVNAADAAALEHDKAYDQQLKAGDNPYLKYNHADAEFQERLKEDTSFGGNLGRAVFQAKKRLLEPLGLVEEAAKTAPGKKRPVEQSPQEPDSSAGIDKSGAQPAKKRLNFGQTGDTESVPDPQPIGEPPAAPSGVGSLTMASGGGAPVADNNEGADGVGSSSGNWHCDSQWLGDRVITTSTRTWALPTYNNHLYKQISNSTSGGSSNDNAYFGYSTPWGYFDFNRFHCHFSPRDWQRLINNNWGFRPKRLNFKLFNIQVKEVTDNNGVKTIANNLTSTVQVFADSDYQLPYVLGSAHEGCLPPFPADVFMIPQYGYLTLNDGSQAVGRSSFYCLEYFPSQMLRTGNNFQFSYEFENVPFHSSYAHSQSLDRLMNPLIDQYLYYLSKTINGSGQNQQTLKFSVAGPSNMAVQGRNYIPGPSYRQQRVSTTVTQNNNSEFAWPGASSWALNGRNSLMNPGPAMASHKEGEDRFFPLSGSLIFGKQGTGRDNVDADKVMITNEEEIKTTNPVATESYGQVATNHQSAQAQAQTGWVQNQGILPGMVWQDRDVYLQGPIWAKIPHTDGNFHPSPLMGGFGMKHPPPQILIKNTPVPADPPTAFNKDKLNSFITQYSTGQVSVEIEWELQKENSKRWNPEIQYTSNYCKSNNVEFAVNTEGVYSEPRPIGTRYLTRNL

SEQ ID NO: 72 - protein, 736 aa, synthetic construct
MAADGYLPDWLEDNLSEGIREWWALKPGAPQPKANQQHQDNARGLVLPGYKYLGPGNGLDKGEPVNAADAAALEHDKAYDQQLKAGDNPYLKYNHADAEFQERLKEDTSFGGNLGRAVFQAKKRLLEPLGLVEEAAKTAPGKKRPVEQSPQEPDSSAGIDKSGAQPAKKRLNFGQTGDTESVPDPQPIGEPPAAPSGVGSLTMASGGGAPVADNNEGADGVGSSSGNWHCDSQWLGDRVITTSTRTWALPTYNNHLYKQISNSTSGGSSNDNAYFGYSTPWGYFDFNRFHCHFSPRDWQRLINNNWGFRPKRLNFKLFNIQVKEVTDNNGVKTIANNLTSTVQVFADSDYQLPYVLGSAHEGCLPPFPADVFMIPQYGYLTLNDGSQAVGRSSFYCLEYFPSQMLRTGNNFQFSYEFENVPFHSSYAHSQSLDRLMNPLIDQYLYYLSKTINGSGQNQQTLKFSVAGPSNMAVQGRNYIPGPSYRQQRVSTTVTQNNNSEIAWPRASSWALNGRNSLMNPGPAMASHKEGEDRFFPLSGSLIFGKQGTGRDNVDADKVMITNEEEIKTTNPVATESYGQVATNHQSAQAQAQTGWVQNQGILPGMVWQDRDVYLQGPIWAKIPHTDGNFHPSPLMGGFGMKHPPPQILIKNTPVPADPPTAFNKDKLNSFITQYSTGQVSVEIEWELQKENSKRWNPEIQYTSNYYKSNNVEFAVNTEGVYSEPRPIGTRYLTRNL

SEQ ID NO: 73 - protein, 736 aa, synthetic construct
MAADGYLPDWLEDNLSEGIREWWALKPGAPQPKANQQHQDNARGLVLPGYKYLGPGNGLDKGEPVNAADAAALEHDKAYDQQLKAGDNPYLKYNHADAEFQERLKEDTSFGGNLGRAVFQAKKRLLEPLGLVEEAAKTAPGKKRPVEQSPQEPDSSAGIDKSGAQPAKKRLNFGQTGDTESVPDPQPIGEPPAAPSGVGSLTMASGGGAPVADNNEGADGVGSSSGNWHCDSQWLGDRVITTSTRTWALPTYNNHLYKQISNSTSGGSSNDNAYFGYSTPWGYFDFNRFHCHFSPRDWQRLINNNWGFRPKRLNFKLFNIQVKEVTDNNGVKTIANNLTSTVQVFADSDYQLPYVLGSAHEGCLPPFPADVFMIPQYGYLTLNDGSQAVGRSSFYCLEYFPSQMLRTGNNFQFSYEFENVPFHSSYAHSQSLDRLMNPLIDQYLYYLSKTINGSGQNQQTLKFSVAGPSNMAVQGRNYIPGPSYRQQRVSTTVTQNNNSEIAWPGASSWALNGRNSLMNPGPAMASHKEGEDRFFPLSGSLIFGKQGTGRDNVDADKVMITNEEEIKTTNPVATESYGQVATNHQSAQAQAQTGWVQNQGILPGMVWQDRDVYLQGPIWAKIPHTDGNFHPSPLMGGFGMKHPPPQILIKNTPVPADPPTAFNKDKLNSFITQYSTGQVSVEIEWELQKENSKRWNPEIQYTSNYCKSNNVEFAVNTEGVYSEPRPIGTRYLTRNL

SEQ ID NO: 74 - protein, 736 aa, synthetic construct
MAADGYLPDWLEDNLSEGIREWWALKPGAPQPKANQQHQDNARGLVLPGYKYLGPGNGLDKGEPVNAADAAALEHDKAYDQQLKAGDNPYLKYNHADAEFQERLKEDTSFGGNLGRAVFQAKKRLLEPLGLVEEAAKTAPGKKRPVEQSPQEPDSSAGIDKSGAQPAKKRLNFGQTGDTESVPDPQPIGEPPAAPSGVGSLTMASGGGAPVADNNEGADGVGSSSGNWHCDSQWLGDRVITTSTRTWALPTYNNHLYKQISNSTSGGSSNDNAYFGYSTPWGYFDFNRFHCHFSPRDWQRLINNNWGFRPKRLNFKLFNIQVKEVTDNNGVKTIANNLTSTVQVFADSDYQLPYVLGSAHEGCLPPFPADVFMIPQYGYLTLNDGSQAVGRSSFYCLEYFPSQMLRTGNNFQFSYEFENVPFHSSYAHSQSLDRLMNPLIDQYLYYLSKTINGSGQNQQTLKFSVAGPSNMAVQGRNYIPGPSYRQQRVSTTVTQNNNSEFAWPRASSWALNGRNSLMNPGPAMASHKEGEDRFFPLSGSLIFGKQGTGRDNVDADKVMITNEEEIKTTNPVATESYGQVATNHQSAQAQAQTGWVQNQGILPGMVWQDRDVYLQGPIWAKIPHTDGNFHPSPLMGGFGMKHPPPQILIKNTPVPADPPTAFNKDKLNSFITQYSTGQVSVEIEWELQKENSKRWNPEIQYTSNYCKSNNVEFAVNTEGVYSEPRPIGTRYLTRNL

SEQ ID NO: 75 - protein, 736 aa, synthetic construct
MAADGYLPDWLEDNLSEGIREWWALKPGAPQPKANQQHQDNARGLVLPGYKYLGPGNGLDKGEPVNAADAAALEHDKAYDQQLKAGDNPYLKYNHADAEFQERLKEDTSFGGNLGRAVFQAKKRLLEPLGLVEEAAKTAPGKKRPVEQSPQEPDSSAGIDKSGAQPAKKRLNFGQTGDTESVPDPQPIGEPPAAPSGVGSLTMASGGGAPVADNNEGADGVGSSSGNWHCDSQWLGDRVITTSTRTWALPTYNNHLYKQISNSTSGGSSNDNAYFGYSTPWGYFDFNRFHCHFSPRDWQRLINNNWGFRPKRLNFKLFNIQVKEVTDNNGVKTIANNLTSTVQVFADSDYQLPYVLGSAHEGCLPPFPADVFMIPQYGYLTLNDGSQAVGRSSFYCLEYFPSQMLRTGNNFQFSYEFENVPFHSSYAHSQSLDRLMNPLIDQYLYYLSKTINGSGQNQQTLKFSVAGPSNMAVQGRNYIPGPSYRQQRVSTTVTQNNNSEIAWPRASSWALNGRNSLMNPGPAMASHKEGEDRFFPLSGSLIFGKQGTGRDNVDADKVMITNEEEIKTTNPVATESYGQVATNHQSAQAQAQTGWVQNQGILPGMVWQDRDVYLQGPIWAKIPHTDGNFHPSPLMGGFGMKHPPPQILIKNTPVPADPPTAFNKDKLNSFITQYSTGQVSVEIEWELQKENSKRWNPEIQYTSNYCKSNNVEFAVNTEGVYSEPRPIGTRYLTRNL

SEQ ID NO: 76 - protein, 736 aa, synthetic construct
MAADGYLPDWLEDNLSEGIREWWALKPGAPQPKANQQHQDNARGLVLPGYKYLGPGNGLDKGEPVNAADAAALEHDKAYDQQLKAGDNPYLKYNHADAEFQERLKEDTSFGGNLGRAVLQAKKRLLEPLGLVEEAAKTAPGKKRPVEQSPQEPDSSAGIGKSGAQPAKKRLNFGQTGDTESVPDPQPIGEPPAAPSGVGSLTMASGGGAPVADNNEGADGVGSSSGNWHCDSQWLGDRVITTSTRTWALPTYNNHLYKQISNSTSGGSSNDNAYFGYSTPWGYFDFNRFHCHFSPRDWQRLINNNWGFRPKRLNFKLFNIQVKEVTDNNGVKTIANNLTSTVQVFTDSDYQLPYVLGSAHEGCLPPFPADVFMIPQYGYLTLNDGSQAVGRSSFYCLEYFPSQMLRTGNNFQFSYEFENVPFHSSYAHSQSLDRLMNPLIDQYLYYLSKTINGSGQNQQTLKFSVAGSSNMAVQGRNYIPGPSYRQQRVSTTVTQNNNSEIAWPGASSWALNGRNSLMNPGPAMASHKEGEDRFFPLSGSLIFGKQGTGRDNVDADKVMITNEEEIKTTNPVATESYGQVATNHQSAQAQAQTGWVQNQGILPGMVWQDRDVYLQGPIWAKIPHTDGNFHPSPLMGGFGMKHPPPQILIKNTPVPADPPTAFNKDKLNSFITQYSTGQVSVEIEWELQKENSKRWNPEIQYTSNYYKSNNVEFAVNTEGVYSEPRPIGTRYLTRNL

SEQ ID NO: 77 - protein, 736 aa, synthetic construct
MAADGYLPDWLEDNLSEGIREWWALKPGAPQPKANQQHQDNARGLVLPGYKYLGPGNGLDKGEPVNAADAAALEHDKAYDQQLKAGDNPYLKYNHADAEFQERLKEDTSFGGNLGRAVLQAKKRLLEPLGLVEEAAKTAPGKKRPVEQSPQEPDSSAGIGKSGAQPAKKRLNFGQTGDTESVPDPQPIGEPPAAPSGVGSLTMASGGGAPVADNNEGADGVGSSSGNWHCDSQWLGDRVITTSTRTWALPTYNNHLYKQISNSTSGGSSNDNAYFGYSTPWGYFDFNRFHCHFSPRDWQRLINNNWGFRPKRLNFKLFNIQVKEVTDNNGVKTIANNLTSTVQVFTDSDYQLPYVLGSAHEGCLPPFPADVFMIPQYGYLTLNDGSQAVGRSSFYCLEYFPSQMLRTGNNFQFSYEFENVPFHSSYAHSQSLDRLMNPLIDQYLYYLSKTINGSGQNQQTLKFSVAGSSNMAVQGRNYIPGPSYRQQRVSTTVTQNNNSEFAWPRASSWALNGRNSLMNPGPAMASHKEGEDRFFPLSGSLIFGKQGTGRDNVDADKVMITNEEEIKTTNPVATESYGQVATNHQSAQAQAQTGWVQNQGILPGMVWQDRDVYLQGPIWAKIPHTDGNFHPSPLMGGFGMKHPPPQILIKNTPVPADPPTAFNKDKLNSFITQYSTGQVSVEIEWELQKENSKRWNPEIQYTSNYYKSNNVEFAVNTEGVYSEPRPIGTRYLTRNL

SEQ ID NO: 78 - protein, 736 aa, synthetic construct
MAADGYLPDWLEDNLSEGIREWWALKPGAPQPKANQQHQDNARGLVLPGYKYLGPGNGLDKGEPVNAADAAALEHDKAYDQQLKAGDNPYLKYNHADAEFQERLKEDTSFGGNLGRAVLQAKKRLLEPLGLVEEAAKTAPGKKRPVEQSPQEPDSSAGIGKSGAQPAKKRLNFGQTGDTESVPDPQPIGEPPAAPSGVGSLTMASGGGAPVADNNEGADGVGSSSGNWHCDSQWLGDRVITTSTRTWALPTYNNHLYKQISNSTSGGSSNDNAYFGYSTPWGYFDFNRFHCHFSPRDWQRLINNNWGFRPKRLNFKLFNIQVKEVTDNNGVKTIANNLTSTVQVFTDSDYQLPYVLGSAHEGCLPPFPADVFMIPQYGYLTLNDGSQAVGRSSFYCLEYFPSQMLRTGNNFQFSYEFENVPFHSSYAHSQSLDRLMNPLIDQYLYYLSKTINGSGQNQQTLKFSVAGSSNMAVQGRNYIPGPSYRQQRVSTTVTQNNNSEFAWPGASSWALNGRNSLMNPGPAMASHKEGEDRFFPLSGSLIFGKQGTGRDNVDADKVMITNEEEIKTTNPVATESYGQVATNHQSAQAQAQTGWVQNQGILPGMVWQDRDVYLQGPIWAKIPHTDGNFHPSPLMGGFGMKHPPPQILIKNTPVPADPPTAFNKDKLNSFITQYSTGQVSVEIEWELQKENSKRWNPEIQYTSNYCKSNNVEFAVNTEGVYSEPRPIGTRYLTRNL

SEQ ID NO: 79 - protein, 736 aa, synthetic construct
MAADGYLPDWLEDNLSEGIREWWALKPGAPQPKANQQHQDNARGLVLPGYKYLGPGNGLDKGEPVNAADAAALEHDKAYDQQLKAGDNPYLKYNHADAEFQERLKEDTSFGGNLGRAVLQAKKRLLEPLGLVEEAAKTAPGKKRPVEQSPQEPDSSAGIGKSGAQPAKKRLNFGQTGDTESVPDPQPIGEPPAAPSGVGSLTMASGGGAPVADNNEGADGVGSSSGNWHCDSQWLGDRVITTSTRTWALPTYNNHLYKQISNSTSGGSSNDNAYFGYSTPWGYFDFNRFHCHFSPRDWQRLINNNWGFRPKRLNFKLFNIQVKEVTDNNGVKTIANNLTSTVQVFTDSDYQLPYVLGSAHEGCLPPFPADVFMIPQYGYLTLNDGSQAVGRSSFYCLEYFPSQMLRTGNNFQFSYEFENVPFHSSYAHSQSLDRLMNPLIDQYLYYLSKTINGSGQNQQTLKFSVAGSSNMAVQGRNYIPGPSYRQQRVSTTVTQNNNSEIAWPRASSWALNGRNSLMNPGPAMASHKEGEDRFFPLSGSLIFGKQGTGRDNVDADKVMITNEEEIKTTNPVATESYGQVATNHQSAQAQAQTGWVQNQGILPGMVWQDRDVYLQGPIWAKIPHTDGNFHPSPLMGGFGMKHPPPQILIKNTPVPADPPTAFNKDKLNSFITQYSTGQVSVEIEWELQKENSKRWNPEIQYTSNYYKSNNVEFAVNTEGVYSEPRPIGTRYLTRNL

SEQ ID NO: 80 - protein, 736 aa, synthetic construct
MAADGYLPDWLEDNLSEGIREWWALKPGAPQPKANQQHQDNARGLVLPGYKYLGPGNGLDKGEPVNAADAAALEHDKAYDQQLKAGDNPYLKYNHADAEFQERLKEDTSFGGNLGRAVLQAKKRLLEPLGLVEEAAKTAPGKKRPVEQSPQEPDSSAGIGKSGAQPAKKRLNFGQTGDTESVPDPQPIGEPPAAPSGVGSLTMASGGGAPVADNNEGADGVGSSSGNWHCDSQWLGDRVITTSTRTWALPTYNNHLYKQISNSTSGGSSNDNAYFGYSTPWGYFDFNRFHCHFSPRDWQRLINNNWGFRPKRLNFKLFNIQVKEVTDNNGVKTIANNLTSTVQVFTDSDYQLPYVLGSAHEGCLPPFPADVFMIPQYGYLTLNDGSQAVGRSSFYCLEYFPSQMLRTGNNFQFSYEFENVPFHSSYAHSQSLDRLMNPLIDQYLYYLSKTINGSGQNQQTLKFSVAGSSNMAVQGRNYIPGPSYRQQRVSTTVTQNNNSEIAWPGASSWALNGRNSLMNPGPAMASHKEGEDRFFPLSGSLIFGKQGTGRDNVDADKVMITNEEEIKTTNPVATESYGQVATNHQSAQAQAQTGWVQNQGILPGMVWQDRDVYLQGPIWAKIPHTDGNFHPSPLMGGFGMKHPPPQILIKNTPVPADPPTAFNKDKLNSFITQYSTGQVSVEIEWELQKENSKRWNPEIQYTSNYCKSNNVEFAVNTEGVYSEPRPIGTRYLTRNL

SEQ ID NO: 81 - protein, 736 aa, synthetic construct
MAADGYLPDWLEDNLSEGIREWWALKPGAPQPKANQQHQDNARGLVLPGYKYLGPGNGLDKGEPVNAADAAALEHDKAYDQQLKAGDNPYLKYNHADAEFQERLKEDTSFGGNLGRAVLQAKKRLLEPLGLVEEAAKTAPGKKRPVEQSPQEPDSSAGIGKSGAQPAKKRLNFGQTGDTESVPDPQPIGEPPAAPSGVGSLTMASGGGAPVADNNEGADGVGSSSGNWHCDSQWLGDRVITTSTRTWALPTYNNHLYKQISNSTSGGSSNDNAYFGYSTPWGYFDFNRFHCHFSPRDWQRLINNNWGFRPKRLNFKLFNIQVKEVTDNNGVKTIANNLTSTVQVFTDSDYQLPYVLGSAHEGCLPPFPADVFMIPQYGYLTLNDGSQAVGRSSFYCLEYFPSQMLRTGNNFQFSYEFENVPFHSSYAHSQSLDRLMNPLIDQYLYYLSKTINGSGQNQQTLKFSVAGSSNMAVQGRNYIPGPSYRQQRVSTTVTQNNNSEFAWPRASSWALNGRNSLMNPGPAMASHKEGEDRFFPLSGSLIFGKQGTGRDNVDADKVMITNEEEIKTTNPVATESYGQVATNHQSAQAQAQTGWVQNQGILPGMVWQDRDVYLQGPIWAKIPHTDGNFHPSPLMGGFGMKHPPPQILIKNTPVPADPPTAFNKDKLNSFITQYSTGQVSVEIEWELQKENSKRWNPEIQYTSNYCKSNNVEFAVNTEGVYSEPRPIGTRYLTRNL

SEQ ID NO: 82 - protein, 736 aa, synthetic construct
MAADGYLPDWLEDNLSEGIREWWALKPGAPQPKANQQHQDNARGLVLPGYKYLGPGNGLDKGEPVNAADAAALEHDKAYDQQLKAGDNPYLKYNHADAEFQERLKEDTSFGGNLGRAVLQAKKRLLEPLGLVEEAAKTAPGKKRPVEQSPQEPDSSAGIGKSGAQPAKKRLNFGQTGDTESVPDPQPIGEPPAAPSGVGSLTMASGGGAPVADNNEGADGVGSSSGNWHCDSQWLGDRVITTSTRTWALPTYNNHLYKQISNSTSGGSSNDNAYFGYSTPWGYFDFNRFHCHFSPRDWQRLINNNWGFRPKRLNFKLFNIQVKEVTDNNGVKTIANNLTSTVQVFTDSDYQLPYVLGSAHEGCLPPFPADVFMIPQYGYLTLNDGSQAVGRSSFYCLEYFPSQMLRTGNNFQFSYEFENVPFHSSYAHSQSLDRLMNPLIDQYLYYLSKTINGSGQNQQTLKFSVAGSSNMAVQGRNYIPGPSYRQQRVSTTVTQNNNSEIAWPRASSWALNGRNSLMNPGPAMASHKEGEDRFFPLSGSLIFGKQGTGRDNVDADKVMITNEEEIKTTNPVATESYGQVATNHQSAQAQAQTGWVQNQGILPGMVWQDRDVYLQGPIWAKIPHTDGNFHPSPLMGGFGMKHPPPQILIKNTPVPADPPTAFNKDKLNSFITQYSTGQVSVEIEWELQKENSKRWNPEIQYTSNYCKSNNVEFAVNTEGVYSEPRPIGTRYLTRNL

SEQ ID NO: 83 - protein, 736 aa, synthetic construct
MAADGYLPDWLEDNLSEGIREWWALKPGAPQPKANQQHQDNARGLVLPGYKYLGPGNGLDKGEPVNAADAAALEHDKAYDQQLKAGDNPYLKYNHADAEFQERLKEDTSFGGNLGRAVLQAKKRLLEPLGLVEEAAKTAPGKKRPVEQSPQEPDSSAGIGKSGAQPAKKRLNFGQTGDTESVPDPQPIGEPPAAPSGVGSLTMASGGGAPVADNNEGADGVGSSSGNWHCDSQWLGDRVITTSTRTWALPTYNNHLYKQISNSTSGGSSNDNAYFGYSTPWGYFDFNRFHCHFSPRDWQRLINNNWGFRPKRLNFKLFNIQVKEVTDNNGVKTIANNLTSTVQVFADSDYQLPYVLGSAHEGCLPPFPADVFMIPQYGYLTLNDGSQAVGRSSFYCLEYFPSQMLRTGNNFQFSYEFENVPFHSSYAHSQSLDRLMNPLIDQYLYYLSKTINGSGQNQQTLKFSVAGSSNMAVQGRNYIPGPSYRQQRVSTTVTQNNNSEFAWPGASSWALNGRNSLMNPGPAMASHKEGEDRFFPLSGSLIFGKQGTGRDNVDADKVMITNEEEIKTTNPVATESYGQVATNHQSAQAQAQTGWVQNQGILPGMVWQDRDVYLQGPIWAKIPHTDGNFHPSPLMGGFGMKHPPPQILIKNTPVPADPPTAFNKDKLNSFITQYSTGQVSVEIEWELQKENSKRWNPEIQYTSNYYKSNNVEFAVNTEGVYSEPRPIGTRYLTRNL

SEQ ID NO: 84 - protein, 736 aa, synthetic construct
MAADGYLPDWLEDNLSEGIREWWALKPGAPQPKANQQHQDNARGLVLPGYKYLGPGNGLDKGEPVNAADAAALEHDKAYDQQLKAGDNPYLKYNHADAEFQERLKEDTSFGGNLGRAVLQAKKRLLEPLGLVEEAAKTAPGKKRPVEQSPQEPDSSAGIGKSGAQPAKKRLNFGQTGDTESVPDPQPIGEPPAAPSGVGSLTMASGGGAPVADNNEGADGVGSSSGNWHCDSQWLGDRVITTSTRTWALPTYNNHLYKQISNSTSGGSSNDNAYFGYSTPWGYFDFNRFHCHFSPRDWQRLINNNWGFRPKRLNFKLFNIQVKEVTDNNGVKTIANNLTSTVQVFADSDYQLPYVLGSAHEGCLPPFPADVFMIPQYGYLTLNDGSQAVGRSSFYCLEYFPSQMLRTGNNFQFSYEFENVPFHSSYAHSQSLDRLMNPLIDQYLYYLSKTINGSGQNQQTLKFSVAGSSNMAVQGRNYIPGPSYRQQRVSTTVTQNNNSEIAWPGASSWALNGRNSLMNPGPAMASHKEGEDRFFPLSGSLIFGKQGTGRDNVDADKVMITNEEEIKTTNPVATESYGQVATNHQSAQAQAQTGWVQNQGILPGMVWQDRDVYLQGPIWAKIPHTDGNFHPSPLMGGFGMKHPPPQILIKNTPVPADPPTAFNKDKLNSFITQYSTGQVSVEIEWELQKENSKRWNPEIQYTSNYYKSNNVEFAVNTEGVYSEPRPIGTRYLTRNL

SEQ ID NO: 85 - protein, 736 aa, synthetic construct
MAADGYLPDWLEDNLSEGIREWWALKPGAPQPKANQQHQDNARGLVLPGYKYLGPGNGLDKGEPVNAADAAALEHDKAYDQQLKAGDNPYLKYNHADAEFQERLKEDTSFGGNLGRAVLQAKKRLLEPLGLVEEAAKTAPGKKRPVEQSPQEPDSSAGIGKSGAQPAKKRLNFGQTGDTESVPDPQPIGEPPAAPSGVGSLTMASGGGAPVADNNEGADGVGSSSGNWHCDSQWLGDRVITTSTRTWALPTYNNHLYKQISNSTSGGSSNDNAYFGYSTPWGYFDFNRFHCHFSPRDWQRLINNNWGFRPKRLNFKLFNIQVKEVTDNNGVKTIANNLTSTVQVFADSDYQLPYVLGSAHEGCLPPFPADVFMIPQYGYLTLNDGSQAVGRSSFYCLEYFPSQMLRTGNNFQFSYEFENVPFHSSYAHSQSLDRLMNPLIDQYLYYLSKTINGSGQNQQTLKFSVAGSSNMAVQGRNYIPGPSYRQQRVSTTVTQNNNSEFAWPRASSWALNGRNSLMNPGPAMASHKEGEDRFFPLSGSLIFGKQGTGRDNVDADKVMITNEEEIKTTNPVATESYGQVATNHQSAQAQAQTGWVQNQGILPGMVWQDRDVYLQGPIWAKIPHTDGNFHPSPLMGGFGMKHPPPQILIKNTPVPADPPTAFNKDKLNSFITQYSTGQVSVEIEWELQKENSKRWNPEIQYTSNYYKSNNVEFAVNTEGVYSEPRPIGTRYLTRNL

SEQ ID NO: 86 - protein, 736 aa, synthetic construct
MAADGYLPDWLEDNLSEGIREWWALKPGAPQPKANQQHQDNARGLVLPGYKYLGPGNGLDKGEPVNAADAAALEHDKAYDQQLKAGDNPYLKYNHADAEFQERLKEDTSFGGNLGRAVLQAKKRLLEPLGLVEEAAKTAPGKKRPVEQSPQEPDSSAGIGKSGAQPAKKRLNFGQTGDTESVPDPQPIGEPPAAPSGVGSLTMASGGGAPVADNNEGADGVGSSSGNWHCDSQWLGDRVITTSTRTWALPTYNNHLYKQISNSTSGGSSNDNAYFGYSTPWGYFDFNRFHCHFSPRDWQRLINNNWGFRPKRLNFKLFNIQVKEVTDNNGVKTIANNLTSTVQVFADSDYQLPYVLGSAHEGCLPPFPADVFMIPQYGYLTLNDGSQAVGRSSFYCLEYFPSQMLRTGNNFQFSYEFENVPFHSSYAHSQSLDRLMNPLIDQYLYYLSKTINGSGQNQQTLKFSVAGSSNMAVQGRNYIPGPSYRQQRVSTTVTQNNNSEFAWPGASSWALNGRNSLMNPGPAMASHKEGEDRFFPLSGSLIFGKQGTGRDNVDADKVMITNEEEIKTTNPVATESYGQVATNHQSAQAQAQTGWVQNQGILPGMVWQDRDVYLQGPIWAKIPHTDGNFHPSPLMGGFGMKHPPPQILIKNTPVPADPPTAFNKDKLNSFITQYSTGQVSVEIEWELQKENSKRWNPEIQYTSNYCKSNNVEFAVNTEGVYSEPRPIGTRYLTRNL

SEQ ID NO: 87 - protein, 736 aa, synthetic construct
MAADGYLPDWLEDNLSEGIREWWALKPGAPQPKANQQHQDNARGLVLPGYKYLGPGNGLDKGEPVNAADAAALEHDKAYDQQLKAGDNPYLKYNHADAEFQERLKEDTSFGGNLGRAVLQAKKRLLEPLGLVEEAAKTAPGKKRPVEQSPQEPDSSAGIGKSGAQPAKKRLNFGQTGDTESVPDPQPIGEPPAAPSGVGSLTMASGGGAPVADNNEGADGVGSSSGNWHCDSQWLGDRVITTSTRTWALPTYNNHLYKQISNSTSGGSSNDNAYFGYSTPWGYFDFNRFHCHFSPRDWQRLINNNWGFRPKRLNFKLFNIQVKEVTDNNGVKTIANNLTSTVQVFADSDYQLPYVLGSAHEGCLPPFPADVFMIPQYGYLTLNDGSQAVGRSSFYCLEYFPSQMLRTGNNFQFSYEFENVPFHSSYAHSQSLDRLMNPLIDQYLYYLSKTINGSGQNQQTLKFSVAGSSNMAVQGRNYIPGPSYRQQRVSTTVTQNNNSEIAWPRASSWALNGRNSLMNPGPAMASHKEGEDRFFPLSGSLIFGKQGTGRDNVDADKVMITNEEEIKTTNPVATESYGQVATNHQSAQAQAQTGWVQNQGILPGMVWQDRDVYLQGPIWAKIPHTDGNFHPSPLMGGFGMKHPPPQILIKNTPVPADPPTAFNKDKLNSFITQYSTGQVSVEIEWELQKENSKRWNPEIQYTSNYYKSNNVEFAVNTEGVYSEPRPIGTRYLTRNL

SEQ ID NO: 88 - protein, 736 aa, synthetic construct
MAADGYLPDWLEDNLSEGIREWWALKPGAPQPKANQQHQDNARGLVLPGYKYLGPGNGLDKGEPVNAADAAALEHDKAYDQQLKAGDNPYLKYNHADAEFQERLKEDTSFGGNLGRAVLQAKKRLLEPLGLVEEAAKTAPGKKRPVEQSPQEPDSSAGIGKSGAQPAKKRLNFGQTGDTESVPDPQPIGEPPAAPSGVGSLTMASGGGAPVADNNEGADGVGSSSGNWHCDSQWLGDRVITTSTRTWALPTYNNHLYKQISNSTSGGSSNDNAYFGYSTPWGYFDFNRFHCHFSPRDWQRLINNNWGFRPKRLNFKLFNIQVKEVTDNNGVKTIANNLTSTVQVFADSDYQLPYVLGSAHEGCLPPFPADVFMIPQYGYLTLNDGSQAVGRSSFYCLEYFPSQMLRTGNNFQFSYEFENVPFHSSYAHSQSLDRLMNPLIDQYLYYLSKTINGSGQNQQTLKFSVAGSSNMAVQGRNYIPGPSYRQQRVSTTVTQNNNSEIAWPGASSWALNGRNSLMNPGPAMASHKEGEDRFFPLSGSLIFGKQGTGRDNVDADKVMITNEEEIKTTNPVATESYGQVATNHQSAQAQAQTGWVQNQGILPGMVWQDRDVYLQGPIWAKIPHTDGNFHPSPLMGGFGMKHPPPQILIKNTPVPADPPTAFNKDKLNSFITQYSTGQVSVEIEWELQKENSKRWNPEIQYTSNYCKSNNVEFAVNTEGVYSEPRPIGTRYLTRNL

SEQ ID NO: 89 - protein, 736 aa, synthetic construct
MAADGYLPDWLEDNLSEGIREWWALKPGAPQPKANQQHQDNARGLVLPGYKYLGPGNGLDKGEPVNAADAAALEHDKAYDQQLKAGDNPYLKYNHADAEFQERLKEDTSFGGNLGRAVLQAKKRLLEPLGLVEEAAKTAPGKKRPVEQSPQEPDSSAGIGKSGAQPAKKRLNFGQTGDTESVPDPQPIGEPPAAPSGVGSLTMASGGGAPVADNNEGADGVGSSSGNWHCDSQWLGDRVITTSTRTWALPTYNNHLYKQISNSTSGGSSNDNAYFGYSTPWGYFDFNRFHCHFSPRDWQRLINNNWGFRPKRLNFKLFNIQVKEVTDNNGVKTIANNLTSTVQVFADSDYQLPYVLGSAHEGCLPPFPADVFMIPQYGYLTLNDGSQAVGRSSFYCLEYFPSQMLRTGNNFQFSYEFENVPFHSSYAHSQSLDRLMNPLIDQYLYYLSKTINGSGQNQQTLKFSVAGSSNMAVQGRNYIPGPSYRQQRVSTTVTQNNNSEFAWPRASSWALNGRNSLMNPGPAMASHKEGEDRFFPLSGSLIFGKQGTGRDNVDADKVMITNEEEIKTTNPVATESYGQVATNHQSAQAQAQTGWVQNQGILPGMVWQDRDVYLQGPIWAKIPHTDGNFHPSPLMGGFGMKHPPPQILIKNTPVPADPPTAFNKDKLNSFITQYSTGQVSVEIEWELQKENSKRWNPEIQYTSNYCKSNNVEFAVNTEGVYSEPRPIGTRYLTRNL

SEQ ID NO: 90 - protein, 736 aa, synthetic construct
MAADGYLPDWLEDNLSEGIREWWALKPGAPQPKANQQHQDNARGLVLPGYKYLGPGNGLDKGEPVNAADAAALEHDKAYDQQLKAGDNPYLKYNHADAEFQERLKEDTSFGGNLGRAVLQAKKRLLEPLGLVEEAAKTAPGKKRPVEQSPQEPDSSAGIGKSGAQPAKKRLNFGQTGDTESVPDPQPIGEPPAAPSGVGSLTMASGGGAPVADNNEGADGVGSSSGNWHCDSQWLGDRVITTSTRTWALPTYNNHLYKQISNSTSGGSSNDNAYFGYSTPWGYFDFNRFHCHFSPRDWQRLINNNWGFRPKRLNFKLFNIQVKEVTDNNGVKTIANNLTSTVQVFADSDYQLPYVLGSAHEGCLPPFPADVFMIPQYGYLTLNDGSQAVGRSSFYCLEYFPSQMLRTGNNFQFSYEFENVPFHSSYAHSQSLDRLMNPLIDQYLYYLSKTINGSGQNQQTLKFSVAGSSNMAVQGRNYIPGPSYRQQRVSTTVTQNNNSEIAWPRASSWALNGRNSLMNPGPAMASHKEGEDRFFPLSGSLIFGKQGTGRDNVDADKVMITNEEEIKTTNPVATESYGQVATNHQSAQAQAQTGWVQNQGILPGMVWQDRDVYLQGPIWAKIPHTDGNFHPSPLMGGFGMKHPPPQILIKNTPVPADPPTAFNKDKLNSFITQYSTGQVSVEIEWELQKENSKRWNPEIQYTSNYCKSNNVEFAVNTEGVYSEPRPIGTRYLTRNL

SEQ ID NO: 91 - protein, 736 aa, synthetic construct
MAADGYLPDWLEDNLSEGIREWWALKPGAPQPKANQQHQDNARGLVLPGYKYLGPGNGLDKGEPVNAADAAALEHDRAYDQQLKAGDNPYLKYNHADAEFQERLKEDTSFGGNLGRAVFQAKKRLLEPLGLVEEAAKTAPGKKRPVEQSPQEPDSSAGIGKSGAQPAKKRLNFGQTGDTESVPDPQPIGEPPAAPSGVGSLTMASGGGAPVADNNEGADGVGSSSGNWHCDSQWLGDRVITTSTRTWALPTYNNHLYKQISNSTSGGSSNDNAYFGYSTPWGYFDFNRFHCHFSPRDWQRLINNNWGFRPKRLNFKLFNIQVKEVTDNNGVKTIANNLTSTVQVFTDSDYQLPYVLGSAHEGCLPPFPADVFMIPQYGYLTLNDGSQAVGRSSFYCLEYFPSQMLRTGNNFQFSYEFENVPFHSSYAHSQSLDRLMNPLIDQYLYYLSKTINGSGQNQQTLKFSVAGPSNMAVQGRNYIPGPSYRQQRVSTTVTQNNNSEIAWPGASSWALNGRNSLMNPGPAMASHKEGEDRFFPLSGSLIFGKQGTGRDNVDADKVMITNEEEIKTTNPVATESYGQVATNHQSAQAQAQTGWVQNQGILPGMVWQDRDVYLQGPIWAKIPHTDGNFHPSPLMGGFGMKHPPPQILIKNTPVPADPPTAFNKDKLNSFITQYSTGQVSVEIEWELQKKNSKRWNPEIQYTSNYYKSNNVEFAVNTEGVYSEPRPIGTRYLTRNL

SEQ ID NO: 92 - protein, 736 aa, synthetic construct
MAADGYLPDWLEDNLSEGIREWWALKPGAPQPKANQQHQDNARGLVLPGYKYLGPGNGLDKGEPVNAADAAALEHDRAYDQQLKAGDNPYLKYNHADAEFQERLKEDTSFGGNLGRAVFQAKKRLLEPLGLVEEAAKTAPGKKRPVEQSPQEPDSSAGIGKSGAQPAKKRLNFGQTGDTESVPDPQPIGEPPAAPSGVGSLTMASGGGAPVADNNEGADGVGSSSGNWHCDSQWLGDRVITTSTRTWALPTYNNHLYKQISNSTSGGSSNDNAYFGYSTPWGYFDFNRFHCHFSPRDWQRLINNNWGFRPKRLNFKLFNIQVKEVTDNNGVKTIANNLTSTVQVFTDSDYQLPYVLGSAHEGCLPPFPADVFMIPQYGYLTLNDGSQAVGRSSFYCLEYFPSQMLRTGNNFQFSYEFENVPFHSSYAHSQSLDRLMNPLIDQYLYYLSKTINGSGQNQQTLKFSVAGPSNMAVQGRNYIPGPSYRQQRVSTTVTQNNNSEFAWPRASSWALNGRNSLMNPGPAMASHKEGEDRFFPLSGSLIFGKQGTGRDNVDADKVMITNEEEIKTTNPVATESYGQVATNHQSAQAQAQTGWVQNQGILPGMVWQDRDVYLQGPIWAKIPHTDGNFHPSPLMGGFGMKHPPPQILIKNTPVPADPPTAFNKDKLNSFITQYSTGQVSVEIEWELQKKNSKRWNPEIQYTSNYYKSNNVEFAVNTEGVYSEPRPIGTRYLTRNL

SEQ ID NO: 93 - protein, 736 aa, synthetic construct
MAADGYLPDWLEDNLSEGIREWWALKPGAPQPKANQQHQDNARGLVLPGYKYLGPGNGLDKGEPVNAADAAALEHDRAYDQQLKAGDNPYLKYNHADAEFQERLKEDTSFGGNLGRAVFQAKKRLLEPLGLVEEAAKTAPGKKRPVEQSPQEPDSSAGIGKSGAQPAKKRLNFGQTGDTESVPDPQPIGEPPAAPSGVGSLTMASGGGAPVADNNEGADGVGSSSGNWHCDSQWLGDRVITTSTRTWALPTYNNHLYKQISNSTSGGSSNDNAYFGYSTPWGYFDFNRFHCHFSPRDWQRLINNNWGFRPKRLNFKLFNIQVKEVTDNNGVKTIANNLTSTVQVFTDSDYQLPYVLGSAHEGCLPPFPADVFMIPQYGYLTLNDGSQAVGRSSFYCLEYFPSQMLRTGNNFQFSYEFENVPFHSSYAHSQSLDRLMNPLIDQYLYYLSKTINGSGQNQQTLKFSVAGPSNMAVQGRNYIPGPSYRQQRVSTTVTQNNNSEFAWPGASSWALNGRNSLMNPGPAMASHKEGEDRFFPLSGSLIFGKQGTGRDNVDADKVMITNEEEIKTTNPVATESYGQVATNHQSAQAQAQTGWVQNQGILPGMVWQDRDVYLQGPIWAKIPHTDGNFHPSPLMGGFGMKHPPPQILIKNTPVPADPPTAFNKDKLNSFITQYSTGQVSVEIEWELQKKNSKRWNPEIQYTSNYCKSNNVEFAVNTEGVYSEPRPIGTRYLTRNL

SEQ ID NO: 94 - protein, 736 aa, synthetic construct
MAADGYLPDWLEDNLSEGIREWWALKPGAPQPKANQQHQDNARGLVLPGYKYLGPGNGLDKGEPVNAADAAALEHDRAYDQQLKAGDNPYLKYNHADAEFQERLKEDTSFGGNLGRAVFQAKKRLLEPLGLVEEAAKTAPGKKRPVEQSPQEPDSSAGIGKSGAQPAKKRLNFGQTGDTESVPDPQPIGEPPAAPSGVGSLTMASGGGAPVADNNEGADGVGSSSGNWHCDSQWLGDRVITTSTRTWALPTYNNHLYKQISNSTSGGSSNDNAYFGYSTPWGYFDFNRFHCHFSPRDWQRLINNNWGFRPKRLNFKLFNIQVKEVTDNNGVKTIANNLTSTVQVFTDSDYQLPYVLGSAHEGCLPPFPADVFMIPQYGYLTLNDGSQAVGRSSFYCLEYFPSQMLRTGNNFQFSYEFENVPFHSSYAHSQSLDRLMNPLIDQYLYYLSKTINGSGQNQQTLKFSVAGPSNMAVQGRNYIPGPSYRQQRVSTTVTQNNNSEIAWPRASSWALNGRNSLMNPGPAMASHKEGEDRFFPLSGSLIFGKQGTGRDNVDADKVMITNEEEIKTTNPVATESYGQVATNHQSAQAQAQTGWVQNQGILPGMVWQDRDVYLQGPIWAKIPHTDGNFHPSPLMGGFGMKHPPPQILIKNTPVPADPPTAFNKDKLNSFITQYSTGQVSVEIEWELQKKNSKRWNPEIQYTSNYYKSNNVEFAVNTEGVYSEPRPIGTRYLTRNL

SEQ ID NO: 95 - protein, 736 aa, synthetic construct
MAADGYLPDWLEDNLSEGIREWWALKPGAPQPKANQQHQDNARGLVLPGYKYLGPGNGLDKGEPVNAADAAALEHDRAYDQQLKAGDNPYLKYNHADAEFQERLKEDTSFGGNLGRAVFQAKKRLLEPLGLVEEAAKTAPGKKRPVEQSPQEPDSSAGIGKSGAQPAKKRLNFGQTGDTESVPDPQPIGEPPAAPSGVGSLTMASGGGAPVADNNEGADGVGSSSGNWHCDSQWLGDRVITTSTRTWALPTYNNHLYKQISNSTSGGSSNDNAYFGYSTPWGYFDFNRFHCHFSPRDWQRLINNNWGFRPKRLNFKLFNIQVKEVTDNNGVKTIANNLTSTVQVFTDSDYQLPYVLGSAHEGCLPPFPADVFMIPQYGYLTLNDGSQAVGRSSFYCLEYFPSQMLRTGNNFQFSYEFENVPFHSSYAHSQSLDRLMNPLIDQYLYYLSKTINGSGQNQQTLKFSVAGPSNMAVQGRNYIPGPSYRQQRVSTTVTQNNNSEIAWPGASSWALNGRNSLMNPGPAMASHKEGEDRFFPLSGSLIFGKQGTGRDNVDADKVMITNEEEIKTTNPVATESYGQVATNHQSAQAQAQTGWVQNQGILPGMVWQDRDVYLQGPIWAKIPHTDGNFHPSPLMGGFGMKHPPPQILIKNTPVPADPPTAFNKDKLNSFITQYSTGQVSVEIEWELQKKNSKRWNPEIQYTSNYCKSNNVEFAVNTEGVYSEPRPIGTRYLTRNL

SEQ ID NO: 96 - protein, 736 aa, synthetic construct
MAADGYLPDWLEDNLSEGIREWWALKPGAPQPKANQQHQDNARGLVLPGYKYLGPGNGLDKGEPVNAADAAALEHDRAYDQQLKAGDNPYLKYNHADAEFQERLKEDTSFGGNLGRAVFQAKKRLLEPLGLVEEAAKTAPGKKRPVEQSPQEPDSSAGIGKSGAQPAKKRLNFGQTGDTESVPDPQPIGEPPAAPSGVGSLTMASGGGAPVADNNEGADGVGSSSGNWHCDSQWLGDRVITTSTRTWALPTYNNHLYKQISNSTSGGSSNDNAYFGYSTPWGYFDFNRFHCHFSPRDWQRLINNNWGFRPKRLNFKLFNIQVKEVTDNNGVKTIANNLTSTVQVFTDSDYQLPYVLGSAHEGCLPPFPADVFMIPQYGYLTLNDGSQAVGRSSFYCLEYFPSQMLRTGNNFQFSYEFENVPFHSSYAHSQSLDRLMNPLIDQYLYYLSKTINGSGQNQQTLKFSVAGPSNMAVQGRNYIPGPSYRQQRVSTTVTQNNNSEFAWPRASSWALNGRNSLMNPGPAMASHKEGEDRFFPLSGSLIFGKQGTGRDNVDADKVMITNEEEIKTTNPVATESYGQVATNHQSAQAQAQTGWVQNQGILPGMVWQDRDVYLQGPIWAKIPHTDGNFHPSPLMGGFGMKHPPPQILIKNTPVPADPPTAFNKDKLNSFITQYSTGQVSVEIEWELQKKNSKRWNPEIQYTSNYCKSNNVEFAVNTEGVYSEPRPIGTRYLTRNL

SEQ ID NO: 97 - protein, 736 aa, synthetic construct
MAADGYLPDWLEDNLSEGIREWWALKPGAPQPKANQQHQDNARGLVLPGYKYLGPGNGLDKGEPVNAADAAALEHDRAYDQQLKAGDNPYLKYNHADAEFQERLKEDTSFGGNLGRAVFQAKKRLLEPLGLVEEAAKTAPGKKRPVEQSPQEPDSSAGIGKSGAQPAKKRLNFGQTGDTESVPDPQPIGEPPAAPSGVGSLTMASGGGAPVADNNEGADGVGSSSGNWHCDSQWLGDRVITTSTRTWALPTYNNHLYKQISNSTSGGSSNDNAYFGYSTPWGYFDFNRFHCHFSPRDWQRLINNNWGFRPKRLNFKLFNIQVKEVTDNNGVKTIANNLTSTVQVFTDSDYQLPYVLGSAHEGCLPPFPADVFMIPQYGYLTLNDGSQAVGRSSFYCLEYFPSQMLRTGNNFQFSYEFENVPFHSSYAHSQSLDRLMNPLIDQYLYYLSKTINGSGQNQQTLKFSVAGPSNMAVQGRNYIPGPSYRQQRVSTTVTQNNNSEIAWPRASSWALNGRNSLMNPGPAMASHKEGEDRFFPLSGSLIFGKQGTGRDNVDADKVMITNEEEIKTTNPVATESYGQVATNHQSAQAQAQTGWVQNQGILPGMVWQDRDVYLQGPIWAKIPHTDGNFHPSPLMGGFGMKHPPPQILIKNTPVPADPPTAFNKDKLNSFITQYSTGQVSVEIEWELQKKNSKRWNPEIQYTSNYCKSNNVEFAVNTEGVYSEPRPIGTRYLTRNL

SEQ ID NO: 98 - protein, 736 aa, synthetic construct
MAADGYLPDWLEDNLSEGIREWWALKPGAPQPKANQQHQDNARGLVLPGYKYLGPGNGLDKGEPVNAADAAALEHDRAYDQQLKAGDNPYLKYNHADAEFQERLKEDTSFGGNLGRAVFQAKKRLLEPLGLVEEAAKTAPGKKRPVEQSPQEPDSSAGIGKSGAQPAKKRLNFGQTGDTESVPDPQPIGEPPAAPSGVGSLTMASGGGAPVADNNEGADGVGSSSGNWHCDSQWLGDRVITTSTRTWALPTYNNHLYKQISNSTSGGSSNDNAYFGYSTPWGYFDFNRFHCHFSPRDWQRLINNNWGFRPKRLNFKLFNIQVKEVTDNNGVKTIANNLTSTVQVFADSDYQLPYVLGSAHEGCLPPFPADVFMIPQYGYLTLNDGSQAVGRSSFYCLEYFPSQMLRTGNNFQFSYEFENVPFHSSYAHSQSLDRLMNPLIDQYLYYLSKTINGSGQNQQTLKFSVAGPSNMAVQGRNYIPGPSYRQQRVSTTVTQNNNSEFAWPGASSWALNGRNSLMNPGPAMASHKEGEDRFFPLSGSLIFGKQGTGRDNVDADKVMITNEEEIKTTNPVATESYGQVATNHQSAQAQAQTGWVQNQGILPGMVWQDRDVYLQGPIWAKIPHTDGNFHPSPLMGGFGMKHPPPQILIKNTPVPADPPTAFNKDKLNSFITQYSTGQVSVEIEWELQKKNSKRWNPEIQYTSNYYKSNNVEFAVNTEGVYSEPRPIGTRYLTRNL

SEQ ID NO: 99 - protein, 736 aa, synthetic construct
MAADGYLPDWLEDNLSEGIREWWALKPGAPQPKANQQHQDNARGLVLPGYKYLGPGNGLDKGEPVNAADAAALEHDRAYDQQLKAGDNPYLKYNHADAEFQERLKEDTSFGGNLGRAVFQAKKRLLEPLGLVEEAAKTAPGKKRPVEQSPQEPDSSAGIGKSGAQPAKKRLNFGQTGDTESVPDPQPIGEPPAAPSGVGSLTMASGGGAPVADNNEGADGVGSSSGNWHCDSQWLGDRVITTSTRTWALPTYNNHLYKQISNSTSGGSSNDNAYFGYSTPWGYFDFNRFHCHFSPRDWQRLINNNWGFRPKRLNFKLFNIQVKEVTDNNGVKTIANNLTSTVQVFADSDYQLPYVLGSAHEGCLPPFPADVFMIPQYGYLTLNDGSQAVGRSSFYCLEYFPSQMLRTGNNFQFSYEFENVPFHSSYAHSQSLDRLMNPLIDQYLYYLSKTINGSGQNQQTLKFSVAGPSNMAVQGRNYIPGPSYRQQRVSTTVTQNNNSEIAWPGASSWALNGRNSLMNPGPAMASHKEGEDRFFPLSGSLIFGKQGTGRDNVDADKVMITNEEEIKTTNPVATESYGQVATNHQSAQAQAQTGWVQNQGILPGMVWQDRDVYLQGPIWAKIPHTDGNFHPSPLMGGFGMKHPPPQILIKNTPVPADPPTAFNKDKLNSFITQYSTGQVSVEIEWELQKKNSKRWNPEIQYTSNYYKSNNVEFAVNTEGVYSEPRPIGTRYLTRNL

SEQ ID NO: 100 - protein, 736 aa, synthetic construct
MAADGYLPDWLEDNLSEGIREWWALKPGAPQPKANQQHQDNARGLVLPGYKYLGPGNGLDKGEPVNAADAAALEHDRAYDQQLKAGDNPYLKYNHADAEFQERLKEDTSFGGNLGRAVFQAKKRLLEPLGLVEEAAKTAPGKKRPVEQSPQEPDSSAGIGKSGAQPAKKRLNFGQTGDTESVPDPQPIGEPPAAPSGVGSLTMASGGGAPVADNNEGADGVGSSSGNWHCDSQWLGDRVITTSTRTWALPTYNNHLYKQISNSTSGGSSNDNAYFGYSTPWGYFDFNRFHCHFSPRDWQRLINNNWGFRPKRLNFKLFNIQVKEVTDNNGVKTIANNLTSTVQVFADSDYQLPYVLGSAHEGCLPPFPADVFMIPQYGYLTLNDGSQAVGRSSFYCLEYFPSQMLRTGNNFQFSYEFENVPFHSSYAHSQSLDRLMNPLIDQYLYYLSKTINGSGQNQQTLKFSVAGPSNMAVQGRNYIPGPSYRQQRVSTTVTQNNNSEFAWPRASSWALNGRNSLMNPGPAMASHKEGEDRFFPLSGSLIFGKQGTGRDNVDADKVMITNEEEIKTTNPVATESYGQVATNHQSAQAQAQTGWVQNQGILPGMVWQDRDVYLQGPIWAKIPHTDGNFHPSPLMGGFGMKHPPPQILIKNTPVPADPPTAFNKDKLNSFITQYSTGQVSVEIEWELQKKNSKRWNPEIQYTSNYYKSNNVEFAVNTEGVYSEPRPIGTRYLTRNL

SEQ ID NO: 101 - protein, 736 aa, synthetic construct
MAADGYLPDWLEDNLSEGIREWWALKPGAPQPKANQQHQDNARGLVLPGYKYLGPGNGLDKGEPVNAADAAALEHDRAYDQQLKAGDNPYLKYNHADAEFQERLKEDTSFGGNLGRAVFQAKKRLLEPLGLVEEAAKTAPGKKRPVEQSPQEPDSSAGIGKSGAQPAKKRLNFGQTGDTESVPDPQPIGEPPAAPSGVGSLTMASGGGAPVADNNEGADGVGSSSGNWHCDSQWLGDRVITTSTRTWALPTYNNHLYKQISNSTSGGSSNDNAYFGYSTPWGYFDFNRFHCHFSPRDWQRLINNNWGFRPKRLNFKLFNIQVKEVTDNNGVKTIANNLTSTVQVFADSDYQLPYVLGSAHEGCLPPFPADVFMIPQYGYLTLNDGSQAVGRSSFYCLEYFPSQMLRTGNNFQFSYEFENVPFHSSYAHSQSLDRLMNPLIDQYLYYLSKTINGSGQNQQTLKFSVAGPSNMAVQGRNYIPGPSYRQQRVSTTVTQNNNSEFAWPGASSWALNGRNSLMNPGPAMASHKEGEDRFFPLSGSLIFGKQGTGRDNVDADKVMITNEEEIKTTNPVATESYGQVATNHQSAQAQAQTGWVQNQGILPGMVWQDRDVYLQGPIWAKIPHTDGNFHPSPLMGGFGMKHPPPQILIKNTPVPADPPTAFNKDKLNSFITQYSTGQVSVEIEWELQKKNSKRWNPEIQYTSNYCKSNNVEFAVNTEGVYSEPRPIGTRYLTRNL

SEQ ID NO: 102 - protein, 736 aa, synthetic construct
MAADGYLPDWLEDNLSEGIREWWALKPGAPQPKANQQHQDNARGLVLPGYKYLGPGNGLDKGEPVNAADAAALEHDRAYDQQLKAGDNPYLKYNHADAEFQERLKEDTSFGGNLGRAVFQAKKRLLEPLGLVEEAAKTAPGKKRPVEQSPQEPDSSAGIGKSGAQPAKKRLNFGQTGDTESVPDPQPIGEPPAAPSGVGSLTMASGGGAPVADNNEGADGVGSSSGNWHCDSQWLGDRVITTSTRTWALPTYNNHLYKQISNSTSGGSSNDNAYFGYSTPWGYFDFNRFHCHFSPRDWQRLINNNWGFRPKRLNFKLFNIQVKEVTDNNGVKTIANNLTSTVQVFADSDYQLPYVLGSAHEGCLPPFPADVFMIPQYGYLTLNDGSQAVGRSSFYCLEYFPSQMLRTGNNFQFSYEFENVPFHSSYAHSQSLDRLMNPLIDQYLYYLSKTINGSGQNQQTLKFSVAGPSNMAVQGRNYIPGPSYRQQRVSTTVTQNNNSEIAWPRASSWALNGRNSLMNPGPAMASHKEGEDRFFPLSGSLIFGKQGTGRDNVDADKVMITNEEEIKTTNPVATESYGQVATNHQSAQAQAQTGWVQNQGILPGMVWQDRDVYLQGPIWAKIPHTDGNFHPSPLMGGFGMKHPPPQILIKNTPVPADPPTAFNKDKLNSFITQYSTGQVSVEIEWELQKKNSKRWNPEIQYTSNYYKSNNVEFAVNTEGVYSEPRPIGTRYLTRNL

SEQ ID NO: 103 - protein, 736 aa, synthetic construct
MAADGYLPDWLEDNLSEGIREWWALKPGAPQPKANQQHQDNARGLVLPGYKYLGPGNGLDKGEPVNAADAAALEHDRAYDQQLKAGDNPYLKYNHADAEFQERLKEDTSFGGNLGRAVFQAKKRLLEPLGLVEEAAKTAPGKKRPVEQSPQEPDSSAGIGKSGAQPAKKRLNFGQTGDTESVPDPQPIGEPPAAPSGVGSLTMASGGGAPVADNNEGADGVGSSSGNWHCDSQWLGDRVITTSTRTWALPTYNNHLYKQISNSTSGGSSNDNAYFGYSTPWGYFDFNRFHCHFSPRDWQRLINNNWGFRPKRLNFKLFNIQVKEVTDNNGVKTIANNLTSTVQVFADSDYQLPYVLGSAHEGCLPPFPADVFMIPQYGYLTLNDGSQAVGRSSFYCLEYFPSQMLRTGNNFQFSYEFENVPFHSSYAHSQSLDRLMNPLIDQYLYYLSKTINGSGQNQQTLKFSVAGPSNMAVQGRNYIPGPSYRQQRVSTTVTQNNNSEIAWPGASSWALNGRNSLMNPGPAMASHKEGEDRFFPLSGSLIFGKQGTGRDNVDADKVMITNEEEIKTTNPVATESYGQVATNHQSAQAQAQTGWVQNQGILPGMVWQDRDVYLQGPIWAKIPHTDGNFHPSPLMGGFGMKHPPPQILIKNTPVPADPPTAFNKDKLNSFITQYSTGQVSVEIEWELQKKNSKRWNPEIQYTSNYCKSNNVEFAVNTEGVYSEPRPIGTRYLTRNL

SEQ ID NO: 104 - protein, 736 aa, synthetic construct
MAADGYLPDWLEDNLSEGIREWWALKPGAPQPKANQQHQDNARGLVLPGYKYLGPGNGLDKGEPVNAADAAALEHDRAYDQQLKAGDNPYLKYNHADAEFQERLKEDTSFGGNLGRAVFQAKKRLLEPLGLVEEAAKTAPGKKRPVEQSPQEPDSSAGIGKSGAQPAKKRLNFGQTGDTESVPDPQPIGEPPAAPSGVGSLTMASGGGAPVADNNEGADGVGSSSGNWHCDSQWLGDRVITTSTRTWALPTYNNHLYKQISNSTSGGSSNDNAYFGYSTPWGYFDFNRFHCHFSPRDWQRLINNNWGFRPKRLNFKLFNIQVKEVTDNNGVKTIANNLTSTVQVFADSDYQLPYVLGSAHEGCLPPFPADVFMIPQYGYLTLNDGSQAVGRSSFYCLEYFPSQMLRTGNNFQFSYEFENVPFHSSYAHSQSLDRLMNPLIDQYLYYLSKTINGSGQNQQTLKFSVAGPSNMAVQGRNYIPGPSYRQQRVSTTVTQNNNSEFAWPRASSWALNGRNSLMNPGPAMASHKEGEDRFFPLSGSLIFGKQGTGRDNVDADKVMITNEEEIKTTNPVATESYGQVATNHQSAQAQAQTGWVQNQGILPGMVWQDRDVYLQGPIWAKIPHTDGNFHPSPLMGGFGMKHPPPQILIKNTPVPADPPTAFNKDKLNSFITQYSTGQVSVEIEWELQKKNSKRWNPEIQYTSNYCKSNNVEFAVNTEGVYSEPRPIGTRYLTRNL

SEQ ID NO: 105 - protein, 736 aa, synthetic construct
MAADGYLPDWLEDNLSEGIREWWALKPGAPQPKANQQHQDNARGLVLPGYKYLGPGNGLDKGEPVNAADAAALEHDRAYDQQLKAGDNPYLKYNHADAEFQERLKEDTSFGGNLGRAVFQAKKRLLEPLGLVEEAAKTAPGKKRPVEQSPQEPDSSAGIGKSGAQPAKKRLNFGQTGDTESVPDPQPIGEPPAAPSGVGSLTMASGGGAPVADNNEGADGVGSSSGNWHCDSQWLGDRVITTSTRTWALPTYNNHLYKQISNSTSGGSSNDNAYFGYSTPWGYFDFNRFHCHFSPRDWQRLINNNWGFRPKRLNFKLFNIQVKEVTDNNGVKTIANNLTSTVQVFADSDYQLPYVLGSAHEGCLPPFPADVFMIPQYGYLTLNDGSQAVGRSSFYCLEYFPSQMLRTGNNFQFSYEFENVPFHSSYAHSQSLDRLMNPLIDQYLYYLSKTINGSGQNQQTLKFSVAGPSNMAVQGRNYIPGPSYRQQRVSTTVTQNNNSEIAWPRASSWALNGRNSLMNPGPAMASHKEGEDRFFPLSGSLIFGKQGTGRDNVDADKVMITNEEEIKTTNPVATESYGQVATNHQSAQAQAQTGWVQNQGILPGMVWQDRDVYLQGPIWAKIPHTDGNFHPSPLMGGFGMKHPPPQILIKNTPVPADPPTAFNKDKLNSFITQYSTGQVSVEIEWELQKKNSKRWNPEIQYTSNYCKSNNVEFAVNTEGVYSEPRPIGTRYLTRNL

SEQ ID NO: 106 - protein, 736 aa, synthetic construct
MAADGYLPDWLEDNLSEGIREWWALKPGAPQPKANQQHQDNARGLVLPGYKYLGPGNGLDKGEPVNAADAAALEHDKAYDQQLKAGDNPYLKYNHADAEFQERLKEDTSFGGNLGRAVFQAKKRLLEPLGLVEEAAKTAPGKKRPVEQSPQEPDSSAGIGKSGAQPAKKRLNFGQTGDTESVPDPQPIGEPPAAPSGVGSLTMASGGGAPVADNNEGADGVGSSSGNWHCDSQWLGDRVITTSTRTWALPTYNNHLYKQISNSTSGGSSNDNAYFGYSTPWGYFDFNRFHCHFSPRDWQRLINNNWGFRPKRLNFKLFNIQVKEVTDNNGVKTIANNLTSTVQVFTDSDYQLPYVLGSAHEGCLPPFPADVFMIPQYGYLTLNDGSQAVGRSSFYCLEYFPSQMLRTGNNFQFSYEFENVPFHSSYAHSQSLDRLMNPLIDQYLYYLSKTINGSGQNQQTLKFSVAGPSNMAVQGRNYIPGPSYRQQRVSTTVTQNNNSEIAWPGASSWALNGRNSLMNPGPAMASHKEGEDRFFPLSGSLIFGKQGTGRDNVDADKVMITNEEEIKTTNPVATESYGQVATNHQSAQARAQTGWVQNQGILPGMVWQDRDVYLQGPIWAKIPHTDGNFHPSPLMGGFGMKHPPPQILIKNTPVPADPPTAFNKDKLNSFITQYSTGQVSVEIEWELQKENSKRWNPEIQYTSNYYKSNNVEFAVNTEGVYSEPRPIGTRYLTRNL

SEQ ID NO: 107 - protein, 736 aa, synthetic construct
MAADGYLPDWLEDNLSEGIREWWALKPGAPQPKANQQHQDNARGLVLPGYKYLGPGNGLDKGEPVNAADAAALEHDKAYDQQLKAGDNPYLKYNHADAEFQERLKEDTSFGGNLGRAVFQAKKRLLEPLGLVEEAAKTAPGKKRPVEQSPQEPDSSAGIGKSGAQPAKKRLNFGQTGDTESVPDPQPIGEPPAAPSGVGSLTMASGGGAPVADNNEGADGVGSSSGNWHCDSQWLGDRVITTSTRTWALPTYNNHLYKQISNSTSGGSSNDNAYFGYSTPWGYFDFNRFHCHFSPRDWQRLINNNWGFRPKRLNFKLFNIQVKEVTDNNGVKTIANNLTSTVQVFTDSDYQLPYVLGSAHEGCLPPFPADVFMIPQYGYLTLNDGSQAVGRSSFYCLEYFPSQMLRTGNNFQFSYEFENVPFHSSYAHSQSLDRLMNPLIDQYLYYLSKTINGSGQNQQTLKFSVAGPSNMAVQGRNYIPGPSYRQQRVSTTVTQNNNSEFAWPRASSWALNGRNSLMNPGPAMASHKEGEDRFFPLSGSLIFGKQGTGRDNVDADKVMITNEEEIKTTNPVATESYGQVATNHQSAQARAQTGWVQNQGILPGMVWQDRDVYLQGPIWAKIPHTDGNFHPSPLMGGFGMKHPPPQILIKNTPVPADPPTAFNKDKLNSFITQYSTGQVSVEIEWELQKENSKRWNPEIQYTSNYYKSNNVEFAVNTEGVYSEPRPIGTRYLTRNL

SEQ ID NO: 108 - protein, 736 aa, synthetic construct
MAADGYLPDWLEDNLSEGIREWWALKPGAPQPKANQQHQDNARGLVLPGYKYLGPGNGLDKGEPVNAADAAALEHDKAYDQQLKAGDNPYLKYNHADAEFQERLKEDTSFGGNLGRAVFQAKKRLLEPLGLVEEAAKTAPGKKRPVEQSPQEPDSSAGIGKSGAQPAKKRLNFGQTGDTESVPDPQPIGEPPAAPSGVGSLTMASGGGAPVADNNEGADGVGSSSGNWHCDSQWLGDRVITTSTRTWALPTYNNHLYKQISNSTSGGSSNDNAYFGYSTPWGYFDFNRFHCHFSPRDWQRLINNNWGFRPKRLNFKLFNIQVKEVTDNNGVKTIANNLTSTVQVFTDSDYQLPYVLGSAHEGCLPPFPADVFMIPQYGYLTLNDGSQAVGRSSFYCLEYFPSQMLRTGNNFQFSYEFENVPFHSSYAHSQSLDRLMNPLIDQYLYYLSKTINGSGQNQQTLKFSVAGPSNMAVQGRNYIPGPSYRQQRVSTTVTQNNNSEFAWPGASSWALNGRNSLMNPGPAMASHKEGEDRFFPLSGSLIFGKQGTGRDNVDADKVMITNEEEIKTTNPVATESYGQVATNHQSAQARAQTGWVQNQGILPGMVWQDRDVYLQGPIWAKIPHTDGNFHPSPLMGGFGMKHPPPQILIKNTPVPADPPTAFNKDKLNSFITQYSTGQVSVEIEWELQKENSKRWNPEIQYTSNYCKSNNVEFAVNTEGVYSEPRPIGTRYLTRNL

SEQ ID NO: 109 - protein, 736 aa, synthetic construct
MAADGYLPDWLEDNLSEGIREWWALKPGAPQPKANQQHQDNARGLVLPGYKYLGPGNGLDKGEPVNAADAAALEHDKAYDQQLKAGDNPYLKYNHADAEFQERLKEDTSFGGNLGRAVFQAKKRLLEPLGLVEEAAKTAPGKKRPVEQSPQEPDSSAGIGKSGAQPAKKRLNFGQTGDTESVPDPQPIGEPPAAPSGVGSLTMASGGGAPVADNNEGADGVGSSSGNWHCDSQWLGDRVITTSTRTWALPTYNNHLYKQISNSTSGGSSNDNAYFGYSTPWGYFDFNRFHCHFSPRDWQRLINNNWGFRPKRLNFKLFNIQVKEVTDNNGVKTIANNLTSTVQVFTDSDYQLPYVLGSAHEGCLPPFPADVFMIPQYGYLTLNDGSQAVGRSSFYCLEYFPSQMLRTGNNFQFSYEFENVPFHSSYAHSQSLDRLMNPLIDQYLYYLSKTINGSGQNQQTLKFSVAGPSNMAVQGRNYIPGPSYRQQRVSTTVTQNNNSEIAWPRASSWALNGRNSLMNPGPAMASHKEGEDRFFPLSGSLIFGKQGTGRDNVDADKVMITNEEEIKTTNPVATESYGQVATNHQSAQARAQTGWVQNQGILPGMVWQDRDVYLQGPIWAKIPHTDGNFHPSPLMGGFGMKHPPPQILIKNTPVPADPPTAFNKDKLNSFITQYSTGQVSVEIEWELQKENSKRWNPEIQYTSNYYKSNNVEFAVNTEGVYSEPRPIGTRYLTRNL

SEQ ID NO: 110 - protein, 736 aa, synthetic construct
MAADGYLPDWLEDNLSEGIREWWALKPGAPQPKANQQHQDNARGLVLPGYKYLGPGNGLDKGEPVNAADAAALEHDKAYDQQLKAGDNPYLKYNHADAEFQERLKEDTSFGGNLGRAVFQAKKRLLEPLGLVEEAAKTAPGKKRPVEQSPQEPDSSAGIGKSGAQPAKKRLNFGQTGDTESVPDPQPIGEPPAAPSGVGSLTMASGGGAPVADNNEGADGVGSSSGNWHCDSQWLGDRVITTSTRTWALPTYNNHLYKQISNSTSGGSSNDNAYFGYSTPWGYFDFNRFHCHFSPRDWQRLINNNWGFRPKRLNFKLFNIQVKEVTDNNGVKTIANNLTSTVQVFTDSDYQLPYVLGSAHEGCLPPFPADVFMIPQYGYLTLNDGSQAVGRSSFYCLEYFPSQMLRTGNNFQFSYEFENVPFHSSYAHSQSLDRLMNPLIDQYLYYLSKTINGSGQNQQTLKFSVAGPSNMAVQGRNYIPGPSYRQQRVSTTVTQNNNSEIAWPGASSWALNGRNSLMNPGPAMASHKEGEDRFFPLSGSLIFGKQGTGRDNVDADKVMITNEEEIKTTNPVATESYGQVATNHQSAQARAQTGWVQNQGILPGMVWQDRDVYLQGPIWAKIPHTDGNFHPSPLMGGFGMKHPPPQILIKNTPVPADPPTAFNKDKLNSFITQYSTGQVSVEIEWELQKENSKRWNPEIQYTSNYCKSNNVEFAVNTEGVYSEPRPIGTRYLTRNL

SEQ ID NO: 111 - protein, 736 aa, synthetic construct
MAADGYLPDWLEDNLSEGIREWWALKPGAPQPKANQQHQDNARGLVLPGYKYLGPGNGLDKGEPVNAADAAALEHDKAYDQQLKAGDNPYLKYNHADAEFQERLKEDTSFGGNLGRAVFQAKKRLLEPLGLVEEAAKTAPGKKRPVEQSPQEPDSSAGIGKSGAQPAKKRLNFGQTGDTESVPDPQPIGEPPAAPSGVGSLTMASGGGAPVADNNEGADGVGSSSGNWHCDSQWLGDRVITTSTRTWALPTYNNHLYKQISNSTSGGSSNDNAYFGYSTPWGYFDFNRFHCHFSPRDWQRLINNNWGFRPKRLNFKLFNIQVKEVTDNNGVKTIANNLTSTVQVFTDSDYQLPYVLGSAHEGCLPPFPADVFMIPQYGYLTLNDGSQAVGRSSFYCLEYFPSQMLRTGNNFQFSYEFENVPFHSSYAHSQSLDRLMNPLIDQYLYYLSKTINGSGQNQQTLKFSVAGPSNMAVQGRNYIPGPSYRQQRVSTTVTQNNNSEFAWPRASSWALNGRNSLMNPGPAMASHKEGEDRFFPLSGSLIFGKQGTGRDNVDADKVMITNEEEIKTTNPVATESYGQVATNHQSAQARAQTGWVQNQGILPGMVWQDRDVYLQGPIWAKIPHTDGNFHPSPLMGGFGMKHPPPQILIKNTPVPADPPTAFNKDKLNSFITQYSTGQVSVEIEWELQKENSKRWNPEIQYTSNYCKSNNVEFAVNTEGVYSEPRPIGTRYLTRNL

SEQ ID NO: 112 - protein, 736 aa, synthetic construct
MAADGYLPDWLEDNLSEGIREWWALKPGAPQPKANQQHQDNARGLVLPGYKYLGPGNGLDKGEPVNAADAAALEHDKAYDQQLKAGDNPYLKYNHADAEFQERLKEDTSFGGNLGRAVFQAKKRLLEPLGLVEEAAKTAPGKKRPVEQSPQEPDSSAGIGKSGAQPAKKRLNFGQTGDTESVPDPQPIGEPPAAPSGVGSLTMASGGGAPVADNNEGADGVGSSSGNWHCDSQWLGDRVITTSTRTWALPTYNNHLYKQISNSTSGGSSNDNAYFGYSTPWGYFDFNRFHCHFSPRDWQRLINNNWGFRPKRLNFKLFNIQVKEVTDNNGVKTIANNLTSTVQVFTDSDYQLPYVLGSAHEGCLPPFPADVFMIPQYGYLTLNDGSQAVGRSSFYCLEYFPSQMLRTGNNFQFSYEFENVPFHSSYAHSQSLDRLMNPLIDQYLYYLSKTINGSGQNQQTLKFSVAGPSNMAVQGRNYIPGPSYRQQRVSTTVTQNNNSEIAWPRASSWALNGRNSLMNPGPAMASHKEGEDRFFPLSGSLIFGKQGTGRDNVDADKVMITNEEEIKTTNPVATESYGQVATNHQSAQARAQTGWVQNQGILPGMVWQDRDVYLQGPIWAKIPHTDGNFHPSPLMGGFGMKHPPPQILIKNTPVPADPPTAFNKDKLNSFITQYSTGQVSVEIEWELQKENSKRWNPEIQYTSNYCKSNNVEFAVNTEGVYSEPRPIGTRYLTRNL

SEQ ID NO: 113 - protein, 736 aa, synthetic construct
MAADGYLPDWLEDNLSEGIREWWALKPGAPQPKANQQHQDNARGLVLPGYKYLGPGNGLDKGEPVNAADAAALEHDKAYDQQLKAGDNPYLKYNHADAEFQERLKEDTSFGGNLGRAVFQAKKRLLEPLGLVEEAAKTAPGKKRPVEQSPQEPDSSAGIGKSGAQPAKKRLNFGQTGDTESVPDPQPIGEPPAAPSGVGSLTMASGGGAPVADNNEGADGVGSSSGNWHCDSQWLGDRVITTSTRTWALPTYNNHLYKQISNSTSGGSSNDNAYFGYSTPWGYFDFNRFHCHFSPRDWQRLINNNWGFRPKRLNFKLFNIQVKEVTDNNGVKTIANNLTSTVQVFADSDYQLPYVLGSAHEGCLPPFPADVFMIPQYGYLTLNDGSQAVGRSSFYCLEYFPSQMLRTGNNFQFSYEFENVPFHSSYAHSQSLDRLMNPLIDQYLYYLSKTINGSGQNQQTLKFSVAGPSNMAVQGRNYIPGPSYRQQRVSTTVTQNNNSEFAWPGASSWALNGRNSLMNPGPAMASHKEGEDRFFPLSGSLIFGKQGTGRDNVDADKVMITNEEEIKTTNPVATESYGQVATNHQSAQARAQTGWVQNQGILPGMVWQDRDVYLQGPIWAKIPHTDGNFHPSPLMGGFGMKHPPPQILIKNTPVPADPPTAFNKDKLNSFITQYSTGQVSVEIEWELQKENSKRWNPEIQYTSNYYKSNNVEFAVNTEGVYSEPRPIGTRYLTRNL

SEQ ID NO: 114 - protein, 736 aa, synthetic construct
MAADGYLPDWLEDNLSEGIREWWALKPGAPQPKANQQHQDNARGLVLPGYKYLGPGNGLDKGEPVNAADAAALEHDKAYDQQLKAGDNPYLKYNHADAEFQERLKEDTSFGGNLGRAVFQAKKRLLEPLGLVEEAAKTAPGKKRPVEQSPQEPDSSAGIGKSGAQPAKKRLNFGQTGDTESVPDPQPIGEPPAAPSGVGSLTMASGGGAPVADNNEGADGVGSSSGNWHCDSQWLGDRVITTSTRTWALPTYNNHLYKQISNSTSGGSSNDNAYFGYSTPWGYFDFNRFHCHFSPRDWQRLINNNWGFRPKRLNFKLFNIQVKEVTDNNGVKTIANNLTSTVQVFADSDYQLPYVLGSAHEGCLPPFPADVFMIPQYGYLTLNDGSQAVGRSSFYCLEYFPSQMLRTGNNFQFSYEFENVPFHSSYAHSQSLDRLMNPLIDQYLYYLSKTINGSGQNQQTLKFSVAGPSNMAVQGRNYIPGPSYRQQRVSTTVTQNNNSEIAWPGASSWALNGRNSLMNPGPAMASHKEGEDRFFPLSGSLIFGKQGTGRDNVDADKVMITNEEEIKTTNPVATESYGQVATNHQSAQARAQTGWVQNQGILPGMVWQDRDVYLQGPIWAKIPHTDGNFHPSPLMGGFGMKHPPPQILIKNTPVPADPPTAFNKDKLNSFITQYSTGQVSVEIEWELQKENSKRWNPEIQYTSNYYKSNNVEFAVNTEGVYSEPRPIGTRYLTRNL

SEQ ID NO: 115 - protein, 736 aa, synthetic construct
MAADGYLPDWLEDNLSEGIREWWALKPGAPQPKANQQHQDNARGLVLPGYKYLGPGNGLDKGEPVNAADAAALEHDKAYDQQLKAGDNPYLKYNHADAEFQERLKEDTSFGGNLGRAVFQAKKRLLEPLGLVEEAAKTAPGKKRPVEQSPQEPDSSAGIGKSGAQPAKKRLNFGQTGDTESVPDPQPIGEPPAAPSGVGSLTMASGGGAPVADNNEGADGVGSSSGNWHCDSQWLGDRVITTSTRTWALPTYNNHLYKQISNSTSGGSSNDNAYFGYSTPWGYFDFNRFHCHFSPRDWQRLINNNWGFRPKRLNFKLFNIQVKEVTDNNGVKTIANNLTSTVQVFADSDYQLPYVLGSAHEGCLPPFPADVFMIPQYGYLTLNDGSQAVGRSSFYCLEYFPSQMLRTGNNFQFSYEFENVPFHSSYAHSQSLDRLMNPLIDQYLYYLSKTINGSGQNQQTLKFSVAGPSNMAVQGRNYIPGPSYRQQRVSTTVTQNNNSEFAWPRASSWALNGRNSLMNPGPAMASHKEGEDRFFPLSGSLIFGKQGTGRDNVDADKVMITNEEEIKTTNPVATESYGQVATNHQSAQARAQTGWVQNQGILPGMVWQDRDVYLQGPIWAKIPHTDGNFHPSPLMGGFGMKHPPPQILIKNTPVPADPPTAFNKDKLNSFITQYSTGQVSVEIEWELQKENSKRWNPEIQYTSNYYKSNNVEFAVNTEGVYSEPRPIGTRYLTRNL

SEQ ID NO: 116 - protein, 736 aa, synthetic construct
MAADGYLPDWLEDNLSEGIREWWALKPGAPQPKANQQHQDNARGLVLPGYKYLGPGNGLDKGEPVNAADAAALEHDKAYDQQLKAGDNPYLKYNHADAEFQERLKEDTSFGGNLGRAVFQAKKRLLEPLGLVEEAAKTAPGKKRPVEQSPQEPDSSAGIGKSGAQPAKKRLNFGQTGDTESVPDPQPIGEPPAAPSGVGSLTMASGGGAPVADNNEGADGVGSSSGNWHCDSQWLGDRVITTSTRTWALPTYNNHLYKQISNSTSGGSSNDNAYFGYSTPWGYFDFNRFHCHFSPRDWQRLINNNWGFRPKRLNFKLFNIQVKEVTDNNGVKTIANNLTSTVQVFADSDYQLPYVLGSAHEGCLPPFPADVFMIPQYGYLTLNDGSQAVGRSSFYCLEYFPSQMLRTGNNFQFSYEFENVPFHSSYAHSQSLDRLMNPLIDQYLYYLSKTINGSGQNQQTLKFSVAGPSNMAVQGRNYIPGPSYRQQRVSTTVTQNNNSEFAWPGASSWALNGRNSLMNPGPAMASHKEGEDRFFPLSGSLIFGKQGTGRDNVDADKVMITNEEEIKTTNPVATESYGQVATNHQSAQARAQTGWVQNQGILPGMVWQDRDVYLQGPIWAKIPHTDGNFHPSPLMGGFGMKHPPPQILIKNTPVPADPPTAFNKDKLNSFITQYSTGQVSVEIEWELQKENSKRWNPEIQYTSNYCKSNNVEFAVNTEGVYSEPRPIGTRYLTRNL

SEQ ID NO: 117 - protein, 736 aa, synthetic construct
MAADGYLPDWLEDNLSEGIREWWALKPGAPQPKANQQHQDNARGLVLPGYKYLGPGNGLDKGEPVNAADAAALEHDKAYDQQLKAGDNPYLKYNHADAEFQERLKEDTSFGGNLGRAVFQAKKRLLEPLGLVEEAAKTAPGKKRPVEQSPQEPDSSAGIGKSGAQPAKKRLNFGQTGDTESVPDPQPIGEPPAAPSGVGSLTMASGGGAPVADNNEGADGVGSSSGNWHCDSQWLGDRVITTSTRTWALPTYNNHLYKQISNSTSGGSSNDNAYFGYSTPWGYFDFNRFHCHFSPRDWQRLINNNWGFRPKRLNFKLFNIQVKEVTDNNGVKTIANNLTSTVQVFADSDYQLPYVLGSAHEGCLPPFPADVFMIPQYGYLTLNDGSQAVGRSSFYCLEYFPSQMLRTGNNFQFSYEFENVPFHSSYAHSQSLDRLMNPLIDQYLYYLSKTINGSGQNQQTLKFSVAGPSNMAVQGRNYIPGPSYRQQRVSTTVTQNNNSEIAWPRASSWALNGRNSLMNPGPAMASHKEGEDRFFPLSGSLIFGKQGTGRDNVDADKVMITNEEEIKTTNPVATESYGQVATNHQSAQARAQTGWVQNQGILPGMVWQDRDVYLQGPIWAKIPHTDGNFHPSPLMGGFGMKHPPPQILIKNTPVPADPPTAFNKDKLNSFITQYSTGQVSVEIEWELQKENSKRWNPEIQYTSNYYKSNNVEFAVNTEGVYSEPRPIGTRYLTRNL

SEQ ID NO: 118 - protein, 736 aa, synthetic construct
MAADGYLPDWLEDNLSEGIREWWALKPGAPQPKANQQHQDNARGLVLPGYKYLGPGNGLDKGEPVNAADAAALEHDKAYDQQLKAGDNPYLKYNHADAEFQERLKEDTSFGGNLGRAVFQAKKRLLEPLGLVEEAAKTAPGKKRPVEQSPQEPDSSAGIGKSGAQPAKKRLNFGQTGDTESVPDPQPIGEPPAAPSGVGSLTMASGGGAPVADNNEGADGVGSSSGNWHCDSQWLGDRVITTSTRTWALPTYNNHLYKQISNSTSGGSSNDNAYFGYSTPWGYFDFNRFHCHFSPRDWQRLINNNWGFRPKRLNFKLFNIQVKEVTDNNGVKTIANNLTSTVQVFADSDYQLPYVLGSAHEGCLPPFPADVFMIPQYGYLTLNDGSQAVGRSSFYCLEYFPSQMLRTGNNFQFSYEFENVPFHSSYAHSQSLDRLMNPLIDQYLYYLSKTINGSGQNQQTLKFSVAGPSNMAVQGRNYIPGPSYRQQRVSTTVTQNNNSEIAWPGASSWALNGRNSLMNPGPAMASHKEGEDRFFPLSGSLIFGKQGTGRDNVDADKVMITNEEEIKTTNPVATESYGQVATNHQSAQARAQTGWVQNQGILPGMVWQDRDVYLQGPIWAKIPHTDGNFHPSPLMGGFGMKHPPPQILIKNTPVPADPPTAFNKDKLNSFITQYSTGQVSVEIEWELQKENSKRWNPEIQYTSNYCKSNNVEFAVNTEGVYSEPRPIGTRYLTRNL

SEQ ID NO: 119 - protein, 736 aa, synthetic construct
MAADGYLPDWLEDNLSEGIREWWALKPGAPQPKANQQHQDNARGLVLPGYKYLGPGNGLDKGEPVNAADAAALEHDKAYDQQLKAGDNPYLKYNHADAEFQERLKEDTSFGGNLGRAVFQAKKRLLEPLGLVEEAAKTAPGKKRPVEQSPQEPDSSAGIGKSGAQPAKKRLNFGQTGDTESVPDPQPIGEPPAAPSGVGSLTMASGGGAPVADNNEGADGVGSSSGNWHCDSQWLGDRVITTSTRTWALPTYNNHLYKQISNSTSGGSSNDNAYFGYSTPWGYFDFNRFHCHFSPRDWQRLINNNWGFRPKRLNFKLFNIQVKEVTDNNGVKTIANNLTSTVQVFADSDYQLPYVLGSAHEGCLPPFPADVFMIPQYGYLTLNDGSQAVGRSSFYCLEYFPSQMLRTGNNFQFSYEFENVPFHSSYAHSQSLDRLMNPLIDQYLYYLSKTINGSGQNQQTLKFSVAGPSNMAVQGRNYIPGPSYRQQRVSTTVTQNNNSEFAWPRASSWALNGRNSLMNPGPAMASHKEGEDRFFPLSGSLIFGKQGTGRDNVDADKVMITNEEEIKTTNPVATESYGQVATNHQSAQARAQTGWVQNQGILPGMVWQDRDVYLQGPIWAKIPHTDGNFHPSPLMGGFGMKHPPPQILIKNTPVPADPPTAFNKDKLNSFITQYSTGQVSVEIEWELQKENSKRWNPEIQYTSNYCKSNNVEFAVNTEGVYSEPRPIGTRYLTRNL

SEQ ID NO: 120 - protein, 736 aa, synthetic construct
MAADGYLPDWLEDNLSEGIREWWALKPGAPQPKANQQHQDNARGLVLPGYKYLGPGNGLDKGEPVNAADAAALEHDKAYDQQLKAGDNPYLKYNHADAEFQERLKEDTSFGGNLGRAVFQAKKRLLEPLGLVEEAAKTAPGKKRPVEQSPQEPDSSAGIGKSGAQPAKKRLNFGQTGDTESVPDPQPIGEPPAAPSGVGSLTMASGGGAPVADNNEGADGVGSSSGNWHCDSQWLGDRVITTSTRTWALPTYNNHLYKQISNSTSGGSSNDNAYFGYSTPWGYFDFNRFHCHFSPRDWQRLINNNWGFRPKRLNFKLFNIQVKEVTDNNGVKTIANNLTSTVQVFADSDYQLPYVLGSAHEGCLPPFPADVFMIPQYGYLTLNDGSQAVGRSSFYCLEYFPSQMLRTGNNFQFSYEFENVPFHSSYAHSQSLDRLMNPLIDQYLYYLSKTINGSGQNQQTLKFSVAGPSNMAVQGRNYIPGPSYRQQRVSTTVTQNNNSEIAWPRASSWALNGRNSLMNPGPAMASHKEGEDRFFPLSGSLIFGKQGTGRDNVDADKVMITNEEEIKTTNPVATESYGQVATNHQSAQARAQTGWVQNQGILPGMVWQDRDVYLQGPIWAKIPHTDGNFHPSPLMGGFGMKHPPPQILIKNTPVPADPPTAFNKDKLNSFITQYSTGQVSVEIEWELQKENSKRWNPEIQYTSNYCKSNNVEFAVNTEGVYSEPRPIGTRYLTRNL

SEQ ID NO: 121 - protein, 736 aa, synthetic construct
MAADGYLPDWLEDNLSEGIREWWALKPGAPQPKANQQHQDNARGLVLPGYKYLGPGNGLDKGEPVNAVDAAALEHDKAYDQQLKAGDNPYLKYNHADAEFQERLKEDTSFGGNLGRAVFQAKKRLLEPLGLVEEAAKTAPGKKRPVEQSPQEPDSSAGIGKSGAQPAKKRLNFGQTGDTESVPDPQPIGEPPAAPSGVGSLTMASGGGAPVADNNEGADGVGSSSGNWHCDSQWLGDRVITTSTRTWALPTYNNHLYKQISNSTSGGSSNDNAYFGYSTPWGYFDFNRFHCHFSPRDWQRLINNNWGFRPKRLNFKLFNIQVKEVTDNNGVKTIANNLTSTVQVFTDSDYQLPYVLGSAHEGCLPPFPADVFMIPQYGYLTLNDGSQAVGRSSFYCLEYFPSQMLRTGNNFQFSYEFENVPFHSSYAHSQSLDRLMNPLIDQYLYYLSKTINGSGQNQQTLKFSVAGPSNMAVQGRNYIPGPSYRQQRVSTTVTQNNNSEIAWPGASSWALNGRNSLMNPGPAMASHKEGEDRFFPLSGSLIFGKQGTGRDNVDADKVMITNEEEIKTTNPVATESYGQVATNHQSAQAQAQTGWVQNQGILPGMVWQDRDVYLQGPIWAKIPHTDGNFHPSPLMGGFGMKHPPPQILIKNTPVPADPPTAFNKDKLNSFITQYSTGQVSVEIEWELQKENSKRWNPEIQYTSNYYKSNNVEFAVNTEGVYSEPRPIGTRYLTRNL

SEQ ID NO: 122 - protein, 736 aa, synthetic construct
MAADGYLPDWLEDNLSEGIREWWALKPGAPQPKANQQHQDNARGLVLPGYKYLGPGNGLDKGEPVNAVDAAALEHDKAYDQQLKAGDNPYLKYNHADAEFQERLKEDTSFGGNLGRAVFQAKKRLLEPLGLVEEAAKTAPGKKRPVEQSPQEPDSSAGIGKSGAQPAKKRLNFGQTGDTESVPDPQPIGEPPAAPSGVGSLTMASGGGAPVADNNEGADGVGSSSGNWHCDSQWLGDRVITTSTRTWALPTYNNHLYKQISNSTSGGSSNDNAYFGYSTPWGYFDFNRFHCHFSPRDWQRLINNNWGFRPKRLNFKLFNIQVKEVTDNNGVKTIANNLTSTVQVFTDSDYQLPYVLGSAHEGCLPPFPADVFMIPQYGYLTLNDGSQAVGRSSFYCLEYFPSQMLRTGNNFQFSYEFENVPFHSSYAHSQSLDRLMNPLIDQYLYYLSKTINGSGQNQQTLKFSVAGPSNMAVQGRNYIPGPSYRQQRVSTTVTQNNNSEFAWPRASSWALNGRNSLMNPGPAMASHKEGEDRFFPLSGSLIFGKQGTGRDNVDADKVMITNEEEIKTTNPVATESYGQVATNHQSAQAQAQTGWVQNQGILPGMVWQDRDVYLQGPIWAKIPHTDGNFHPSPLMGGFGMKHPPPQILIKNTPVPADPPTAFNKDKLNSFITQYSTGQVSVEIEWELQKENSKRWNPEIQYTSNYYKSNNVEFAVNTEGVYSEPRPIGTRYLTRNL

SEQ ID NO: 123 - protein, 736 aa, synthetic construct
MAADGYLPDWLEDNLSEGIREWWALKPGAPQPKANQQHQDNARGLVLPGYKYLGPGNGLDKGEPVNAVDAAALEHDKAYDQQLKAGDNPYLKYNHADAEFQERLKEDTSFGGNLGRAVFQAKKRLLEPLGLVEEAAKTAPGKKRPVEQSPQEPDSSAGIGKSGAQPAKKRLNFGQTGDTESVPDPQPIGEPPAAPSGVGSLTMASGGGAPVADNNEGADGVGSSSGNWHCDSQWLGDRVITTSTRTWALPTYNNHLYKQISNSTSGGSSNDNAYFGYSTPWGYFDFNRFHCHFSPRDWQRLINNNWGFRPKRLNFKLFNIQVKEVTDNNGVKTIANNLTSTVQVFTDSDYQLPYVLGSAHEGCLPPFPADVFMIPQYGYLTLNDGSQAVGRSSFYCLEYFPSQMLRTGNNFQFSYEFENVPFHSSYAHSQSLDRLMNPLIDQYLYYLSKTINGSGQNQQTLKFSVAGPSNMAVQGRNYIPGPSYRQQRVSTTVTQNNNSEFAWPGASSWALNGRNSLMNPGPAMASHKEGEDRFFPLSGSLIFGKQGTGRDNVDADKVMITNEEEIKTTNPVATESYGQVATNHQSAQAQAQTGWVQNQGILPGMVWQDRDVYLQGPIWAKIPHTDGNFHPSPLMGGFGMKHPPPQILIKNTPVPADPPTAFNKDKLNSFITQYSTGQVSVEIEWELQKENSKRWNPEIQYTSNYCKSNNVEFAVNTEGVYSEPRPIGTRYLTRNL

SEQ ID NO: 124 - protein, 736 aa, synthetic construct
MAADGYLPDWLEDNLSEGIREWWALKPGAPQPKANQQHQDNARGLVLPGYKYLGPGNGLDKGEPVNAVDAAALEHDKAYDQQLKAGDNPYLKYNHADAEFQERLKEDTSFGGNLGRAVFQAKKRLLEPLGLVEEAAKTAPGKKRPVEQSPQEPDSSAGIGKSGAQPAKKRLNFGQTGDTESVPDPQPIGEPPAAPSGVGSLTMASGGGAPVADNNEGADGVGSSSGNWHCDSQWLGDRVITTSTRTWALPTYNNHLYKQISNSTSGGSSNDNAYFGYSTPWGYFDFNRFHCHFSPRDWQRLINNNWGFRPKRLNFKLFNIQVKEVTDNNGVKTIANNLTSTVQVFTDSDYQLPYVLGSAHEGCLPPFPADVFMIPQYGYLTLNDGSQAVGRSSFYCLEYFPSQMLRTGNNFQFSYEFENVPFHSSYAHSQSLDRLMNPLIDQYLYYLSKTINGSGQNQQTLKFSVAGPSNMAVQGRNYIPGPSYRQQRVSTTVTQNNNSEIAWPRASSWALNGRNSLMNPGPAMASHKEGEDRFFPLSGSLIFGKQGTGRDNVDADKVMITNEEEIKTTNPVATESYGQVATNHQSAQAQAQTGWVQNQGILPGMVWQDRDVYLQGPIWAKIPHTDGNFHPSPLMGGFGMKHPPPQILIKNTPVPADPPTAFNKDKLNSFITQYSTGQVSVEIEWELQKENSKRWNPEIQYTSNYYKSNNVEFAVNTEGVYSEPRPIGTRYLTRNL

SEQ ID NO: 125 - protein, 736 aa, synthetic construct
MAADGYLPDWLEDNLSEGIREWWALKPGAPQPKANQQHQDNARGLVLPGYKYLGPGNGLDKGEPVNAVDAAALEHDKAYDQQLKAGDNPYLKYNHADAEFQERLKEDTSFGGNLGRAVFQAKKRLLEPLGLVEEAAKTAPGKKRPVEQSPQEPDSSAGIGKSGAQPAKKRLNFGQTGDTESVPDPQPIGEPPAAPSGVGSLTMASGGGAPVADNNEGADGVGSSSGNWHCDSQWLGDRVITTSTRTWALPTYNNHLYKQISNSTSGGSSNDNAYFGYSTPWGYFDFNRFHCHFSPRDWQRLINNNWGFRPKRLNFKLFNIQVKEVTDNNGVKTIANNLTSTVQVFTDSDYQLPYVLGSAHEGCLPPFPADVFMIPQYGYLTLNDGSQAVGRSSFYCLEYFPSQMLRTGNNFQFSYEFENVPFHSSYAHSQSLDRLMNPLIDQYLYYLSKTINGSGQNQQTLKFSVAGPSNMAVQGRNYIPGPSYRQQRVSTTVTQNNNSEIAWPGASSWALNGRNSLMNPGPAMASHKEGEDRFFPLSGSLIFGKQGTGRDNVDADKVMITNEEEIKTTNPVATESYGQVATNHQSAQAQAQTGWVQNQGILPGMVWQDRDVYLQGPIWAKIPHTDGNFHPSPLMGGFGMKHPPPQILIKNTPVPADPPTAFNKDKLNSFITQYSTGQVSVEIEWELQKENSKRWNPEIQYTSNYCKSNNVEFAVNTEGVYSEPRPIGTRYLTRNL

SEQ ID NO: 126 - protein, 736 aa, synthetic construct
MAADGYLPDWLEDNLSEGIREWWALKPGAPQPKANQQHQDNARGLVLPGYKYLGPGNGLDKGEPVNAVDAAALEHDKAYDQQLKAGDNPYLKYNHADAEFQERLKEDTSFGGNLGRAVFQAKKRLLEPLGLVEEAAKTAPGKKRPVEQSPQEPDSSAGIGKSGAQPAKKRLNFGQTGDTESVPDPQPIGEPPAAPSGVGSLTMASGGGAPVADNNEGADGVGSSSGNWHCDSQWLGDRVITTSTRTWALPTYNNHLYKQISNSTSGGSSNDNAYFGYSTPWGYFDFNRFHCHFSPRDWQRLINNNWGFRPKRLNFKLFNIQVKEVTDNNGVKTIANNLTSTVQVFTDSDYQLPYVLGSAHEGCLPPFPADVFMIPQYGYLTLNDGSQAVGRSSFYCLEYFPSQMLRTGNNFQFSYEFENVPFHSSYAHSQSLDRLMNPLIDQYLYYLSKTINGSGQNQQTLKFSVAGPSNMAVQGRNYIPGPSYRQQRVSTTVTQNNNSEFAWPRASSWALNGRNSLMNPGPAMASHKEGEDRFFPLSGSLIFGKQGTGRDNVDADKVMITNEEEIKTTNPVATESYGQVATNHQSAQAQAQTGWVQNQGILPGMVWQDRDVYLQGPIWAKIPHTDGNFHPSPLMGGFGMKHPPPQILIKNTPVPADPPTAFNKDKLNSFITQYSTGQVSVEIEWELQKENSKRWNPEIQYTSNYCKSNNVEFAVNTEGVYSEPRPIGTRYLTRNL

SEQ ID NO: 127 - protein, 736 aa, synthetic construct
MAADGYLPDWLEDNLSEGIREWWALKPGAPQPKANQQHQDNARGLVLPGYKYLGPGNGLDKGEPVNAVDAAALEHDKAYDQQLKAGDNPYLKYNHADAEFQERLKEDTSFGGNLGRAVFQAKKRLLEPLGLVEEAAKTAPGKKRPVEQSPQEPDSSAGIGKSGAQPAKKRLNFGQTGDTESVPDPQPIGEPPAAPSGVGSLTMASGGGAPVADNNEGADGVGSSSGNWHCDSQWLGDRVITTSTRTWALPTYNNHLYKQISNSTSGGSSNDNAYFGYSTPWGYFDFNRFHCHFSPRDWQRLINNNWGFRPKRLNFKLFNIQVKEVTDNNGVKTIANNLTSTVQVFTDSDYQLPYVLGSAHEGCLPPFPADVFMIPQYGYLTLNDGSQAVGRSSFYCLEYFPSQMLRTGNNFQFSYEFENVPFHSSYAHSQSLDRLMNPLIDQYLYYLSKTINGSGQNQQTLKFSVAGPSNMAVQGRNYIPGPSYRQQRVSTTVTQNNNSEIAWPRASSWALNGRNSLMNPGPAMASHKEGEDRFFPLSGSLIFGKQGTGRDNVDADKVMITNEEEIKTTNPVATESYGQVATNHQSAQAQAQTGWVQNQGILPGMVWQDRDVYLQGPIWAKIPHTDGNFHPSPLMGGFGMKHPPPQILIKNTPVPADPPTAFNKDKLNSFITQYSTGQVSVEIEWELQKENSKRWNPEIQYTSNYCKSNNVEFAVNTEGVYSEPRPIGTRYLTRNL

SEQ ID NO: 128 - protein, 736 aa, synthetic construct
MAADGYLPDWLEDNLSEGIREWWALKPGAPQPKANQQHQDNARGLVLPGYKYLGPGNGLDKGEPVNAVDAAALEHDKAYDQQLKAGDNPYLKYNHADAEFQERLKEDTSFGGNLGRAVFQAKKRLLEPLGLVEEAAKTAPGKKRPVEQSPQEPDSSAGIGKSGAQPAKKRLNFGQTGDTESVPDPQPIGEPPAAPSGVGSLTMASGGGAPVADNNEGADGVGSSSGNWHCDSQWLGDRVITTSTRTWALPTYNNHLYKQISNSTSGGSSNDNAYFGYSTPWGYFDFNRFHCHFSPRDWQRLINNNWGFRPKRLNFKLFNIQVKEVTDNNGVKTIANNLTSTVQVFADSDYQLPYVLGSAHEGCLPPFPADVFMIPQYGYLTLNDGSQAVGRSSFYCLEYFPSQMLRTGNNFQFSYEFENVPFHSSYAHSQSLDRLMNPLIDQYLYYLSKTINGSGQNQQTLKFSVAGPSNMAVQGRNYIPGPSYRQQRVSTTVTQNNNSEFAWPGASSWALNGRNSLMNPGPAMASHKEGEDRFFPLSGSLIFGKQGTGRDNVDADKVMITNEEEIKTTNPVATESYGQVATNHQSAQAQAQTGWVQNQGILPGMVWQDRDVYLQGPIWAKIPHTDGNFHPSPLMGGFGMKHPPPQILIKNTPVPADPPTAFNKDKLNSFITQYSTGQVSVEIEWELQKENSKRWNPEIQYTSNYYKSNNVEFAVNTEGVYSEPRPIGTRYLTRNL

SEQ ID NO: 129 - protein, 736 aa, synthetic construct
MAADGYLPDWLEDNLSEGIREWWALKPGAPQPKANQQHQDNARGLVLPGYKYLGPGNGLDKGEPVNAVDAAALEHDKAYDQQLKAGDNPYLKYNHADAEFQERLKEDTSFGGNLGRAVFQAKKRLLEPLGLVEEAAKTAPGKKRPVEQSPQEPDSSAGIGKSGAQPAKKRLNFGQTGDTESVPDPQPIGEPPAAPSGVGSLTMASGGGAPVADNNEGADGVGSSSGNWHCDSQWLGDRVITTSTRTWALPTYNNHLYKQISNSTSGGSSNDNAYFGYSTPWGYFDFNRFHCHFSPRDWQRLINNNWGFRPKRLNFKLFNIQVKEVTDNNGVKTIANNLTSTVQVFADSDYQLPYVLGSAHEGCLPPFPADVFMIPQYGYLTLNDGSQAVGRSSFYCLEYFPSQMLRTGNNFQFSYEFENVPFHSSYAHSQSLDRLMNPLIDQYLYYLSKTINGSGQNQQTLKFSVAGPSNMAVQGRNYIPGPSYRQQRVSTTVTQNNNSEIAWPGASSWALNGRNSLMNPGPAMASHKEGEDRFFPLSGSLIFGKQGTGRDNVDADKVMITNEEEIKTTNPVATESYGQVATNHQSAQAQAQTGWVQNQGILPGMVWQDRDVYLQGPIWAKIPHTDGNFHPSPLMGGFGMKHPPPQILIKNTPVPADPPTAFNKDKLNSFITQYSTGQVSVEIEWELQKENSKRWNPEIQYTSNYYKSNNVEFAVNTEGVYSEPRPIGTRYLTRNL

SEQ ID NO: 130 - protein, 736 aa, synthetic construct
MAADGYLPDWLEDNLSEGIREWWALKPGAPQPKANQQHQDNARGLVLPGYKYLGPGNGLDKGEPVNAVDAAALEHDKAYDQQLKAGDNPYLKYNHADAEFQERLKEDTSFGGNLGRAVFQAKKRLLEPLGLVEEAAKTAPGKKRPVEQSPQEPDSSAGIGKSGAQPAKKRLNFGQTGDTESVPDPQPIGEPPAAPSGVGSLTMASGGGAPVADNNEGADGVGSSSGNWHCDSQWLGDRVITTSTRTWALPTYNNHLYKQISNSTSGGSSNDNAYFGYSTPWGYFDFNRFHCHFSPRDWQRLINNNWGFRPKRLNFKLFNIQVKEVTDNNGVKTIANNLTSTVQVFADSDYQLPYVLGSAHEGCLPPFPADVFMIPQYGYLTLNDGSQAVGRSSFYCLEYFPSQMLRTGNNFQFSYEFENVPFHSSYAHSQSLDRLMNPLIDQYLYYLSKTINGSGQNQQTLKFSVAGPSNMAVQGRNYIPGPSYRQQRVSTTVTQNNNSEFAWPRASSWALNGRNSLMNPGPAMASHKEGEDRFFPLSGSLIFGKQGTGRDNVDADKVMITNEEEIKTTNPVATESYGQVATNHQSAQAQAQTGWVQNQGILPGMVWQDRDVYLQGPIWAKIPHTDGNFHPSPLMGGFGMKHPPPQILIKNTPVPADPPTAFNKDKLNSFITQYSTGQVSVEIEWELQKENSKRWNPEIQYTSNYYKSNNVEFAVNTEGVYSEPRPIGTRYLTRNL

SEQ ID NO: 131 - protein, 736 aa, synthetic construct
MAADGYLPDWLEDNLSEGIREWWALKPGAPQPKANQQHQDNARGLVLPGYKYLGPGNGLDKGEPVNAVDAAALEHDKAYDQQLKAGDNPYLKYNHADAEFQERLKEDTSFGGNLGRAVFQAKKRLLEPLGLVEEAAKTAPGKKRPVEQSPQEPDSSAGIGKSGAQPAKKRLNFGQTGDTESVPDPQPIGEPPAAPSGVGSLTMASGGGAPVADNNEGADGVGSSSGNWHCDSQWLGDRVITTSTRTWALPTYNNHLYKQISNSTSGGSSNDNAYFGYSTPWGYFDFNRFHCHFSPRDWQRLINNNWGFRPKRLNFKLFNIQVKEVTDNNGVKTIANNLTSTVQVFADSDYQLPYVLGSAHEGCLPPFPADVFMIPQYGYLTLNDGSQAVGRSSFYCLEYFPSQMLRTGNNFQFSYEFENVPFHSSYAHSQSLDRLMNPLIDQYLYYLSKTINGSGQNQQTLKFSVAGPSNMAVQGRNYIPGPSYRQQRVSTTVTQNNNSEFAWPGASSWALNGRNSLMNPGPAMASHKEGEDRFFPLSGSLIFGKQGTGRDNVDADKVMITNEEEIKTTNPVATESYGQVATNHQSAQAQAQTGWVQNQGILPGMVWQDRDVYLQGPIWAKIPHTDGNFHPSPLMGGFGMKHPPPQILIKNTPVPADPPTAFNKDKLNSFITQYSTGQVSVEIEWELQKENSKRWNPEIQYTSNYCKSNNVEFAVNTEGVYSEPRPIGTRYLTRNL

SEQ ID NO: 132 - protein, 736 aa, synthetic construct
MAADGYLPDWLEDNLSEGIREWWALKPGAPQPKANQQHQDNARGLVLPGYKYLGPGNGLDKGEPVNAVDAAALEHDKAYDQQLKAGDNPYLKYNHADAEFQERLKEDTSFGGNLGRAVFQAKKRLLEPLGLVEEAAKTAPGKKRPVEQSPQEPDSSAGIGKSGAQPAKKRLNFGQTGDTESVPDPQPIGEPPAAPSGVGSLTMASGGGAPVADNNEGADGVGSSSGNWHCDSQWLGDRVITTSTRTWALPTYNNHLYKQISNSTSGGSSNDNAYFGYSTPWGYFDFNRFHCHFSPRDWQRLINNNWGFRPKRLNFKLFNIQVKEVTDNNGVKTIANNLTSTVQVFADSDYQLPYVLGSAHEGCLPPFPADVFMIPQYGYLTLNDGSQAVGRSSFYCLEYFPSQMLRTGNNFQFSYEFENVPFHSSYAHSQSLDRLMNPLIDQYLYYLSKTINGSGQNQQTLKFSVAGPSNMAVQGRNYIPGPSYRQQRVSTTVTQNNNSEIAWPRASSWALNGRNSLMNPGPAMASHKEGEDRFFPLSGSLIFGKQGTGRDNVDADKVMITNEEEIKTTNPVATESYGQVATNHQSAQAQAQTGWVQNQGILPGMVWQDRDVYLQGPIWAKIPHTDGNFHPSPLMGGFGMKHPPPQILIKNTPVPADPPTAFNKDKLNSFITQYSTGQVSVEIEWELQKENSKRWNPEIQYTSNYYKSNNVEFAVNTEGVYSEPRPIGTRYLTRNL

SEQ ID NO: 133 - protein, 736 aa, synthetic construct
MAADGYLPDWLEDNLSEGIREWWALKPGAPQPKANQQHQDNARGLVLPGYKYLGPGNGLDKGEPVNAVDAAALEHDKAYDQQLKAGDNPYLKYNHADAEFQERLKEDTSFGGNLGRAVFQAKKRLLEPLGLVEEAAKTAPGKKRPVEQSPQEPDSSAGIGKSGAQPAKKRLNFGQTGDTESVPDPQPIGEPPAAPSGVGSLTMASGGGAPVADNNEGADGVGSSSGNWHCDSQWLGDRVITTSTRTWALPTYNNHLYKQISNSTSGGSSNDNAYFGYSTPWGYFDFNRFHCHFSPRDWQRLINNNWGFRPKRLNFKLFNIQVKEVTDNNGVKTIANNLTSTVQVFADSDYQLPYVLGSAHEGCLPPFPADVFMIPQYGYLTLNDGSQAVGRSSFYCLEYFPSQMLRTGNNFQFSYEFENVPFHSSYAHSQSLDRLMNPLIDQYLYYLSKTINGSGQNQQTLKFSVAGPSNMAVQGRNYIPGPSYRQQRVSTTVTQNNNSEIAWPGASSWALNGRNSLMNPGPAMASHKEGEDRFFPLSGSLIFGKQGTGRDNVDADKVMITNEEEIKTTNPVATESYGQVATNHQSAQAQAQTGWVQNQGILPGMVWQDRDVYLQGPIWAKIPHTDGNFHPSPLMGGFGMKHPPPQILIKNTPVPADPPTAFNKDKLNSFITQYSTGQVSVEIEWELQKENSKRWNPEIQYTSNYCKSNNVEFAVNTEGVYSEPRPIGTRYLTRNL

SEQ ID NO: 134 - protein, 736 aa, synthetic construct
MAADGYLPDWLEDNLSEGIREWWALKPGAPQPKANQQHQDNARGLVLPGYKYLGPGNGLDKGEPVNAVDAAALEHDKAYDQQLKAGDNPYLKYNHADAEFQERLKEDTSFGGNLGRAVFQAKKRLLEPLGLVEEAAKTAPGKKRPVEQSPQEPDSSAGIGKSGAQPAKKRLNFGQTGDTESVPDPQPIGEPPAAPSGVGSLTMASGGGAPVADNNEGADGVGSSSGNWHCDSQWLGDRVITTSTRTWALPTYNNHLYKQISNSTSGGSSNDNAYFGYSTPWGYFDFNRFHCHFSPRDWQRLINNNWGFRPKRLNFKLFNIQVKEVTDNNGVKTIANNLTSTVQVFADSDYQLPYVLGSAHEGCLPPFPADVFMIPQYGYLTLNDGSQAVGRSSFYCLEYFPSQMLRTGNNFQFSYEFENVPFHSSYAHSQSLDRLMNPLIDQYLYYLSKTINGSGQNQQTLKFSVAGPSNMAVQGRNYIPGPSYRQQRVSTTVTQNNNSEFAWPRASSWALNGRNSLMNPGPAMASHKEGEDRFFPLSGSLIFGKQGTGRDNVDADKVMITNEEEIKTTNPVATESYGQVATNHQSAQAQAQTGWVQNQGILPGMVWQDRDVYLQGPIWAKIPHTDGNFHPSPLMGGFGMKHPPPQILIKNTPVPADPPTAFNKDKLNSFITQYSTGQVSVEIEWELQKENSKRWNPEIQYTSNYCKSNNVEFAVNTEGVYSEPRPIGTRYLTRNL

SEQ ID NO: 135 - protein, 736 aa, synthetic construct
MAADGYLPDWLEDNLSEGIREWWALKPGAPQPKANQQHQDNARGLVLPGYKYLGPGNGLDKGEPVNAVDAAALEHDKAYDQQLKAGDNPYLKYNHADAEFQERLKEDTSFGGNLGRAVFQAKKRLLEPLGLVEEAAKTAPGKKRPVEQSPQEPDSSAGIGKSGAQPAKKRLNFGQTGDTESVPDPQPIGEPPAAPSGVGSLTMASGGGAPVADNNEGADGVGSSSGNWHCDSQWLGDRVITTSTRTWALPTYNNHLYKQISNSTSGGSSNDNAYFGYSTPWGYFDFNRFHCHFSPRDWQRLINNNWGFRPKRLNFKLFNIQVKEVTDNNGVKTIANNLTSTVQVFADSDYQLPYVLGSAHEGCLPPFPADVFMIPQYGYLTLNDGSQAVGRSSFYCLEYFPSQMLRTGNNFQFSYEFENVPFHSSYAHSQSLDRLMNPLIDQYLYYLSKTINGSGQNQQTLKFSVAGPSNMAVQGRNYIPGPSYRQQRVSTTVTQNNNSEIAWPRASSWALNGRNSLMNPGPAMASHKEGEDRFFPLSGSLIFGKQGTGRDNVDADKVMITNEEEIKTTNPVATESYGQVATNHQSAQAQAQTGWVQNQGILPGMVWQDRDVYLQGPIWAKIPHTDGNFHPSPLMGGFGMKHPPPQILIKNTPVPADPPTAFNKDKLNSFITQYSTGQVSVEIEWELQKENSKRWNPEIQYTSNYCKSNNVEFAVNTEGVYSEPRPIGTRYLTRNL

SEQ ID NO: 136 - protein, 736 aa, synthetic construct
MAADGYLPDWLEDNLSEGIREWWALKPGAPQPKANQQHQDNARGLVLPGYKYLGPGNGLDKGEPVNAADAAALEHDKAYDQQLKAGDNPYLKYNHADAEFQERLKEDTSFGGNLGRAVFQAKKRLLEPLGLVEEAAKTAPGKKRPVEQSPREPDSSAGIGKSGAQPAKKRLNFGQTGDTESVPDPQPIGEPPAAPSGVGSLTMASGGGAPVADNNEGADGVGSSSGNWHCDSQWLGDRVITTSTRTWALPTYNNHLYKQISNSTSGGSSNDNAYFGYSTPWGYFDFNRFHCHFSPRDWQRLINNNWGFRPKRLNFKLFNIQVKEVTDNNGVKTIANNLTSTVQVFTDSDYQLPYVLGSAHEGCLPPFPADVFMIPQYGYLTLNDGSQAVGRSSFYCLEYFPSQMLRTGNNFQFSYEFENVPFHSSYAHSQSLDRLMNPLIDQYLYYLSKTINGSGQNQQTLKFSVAGPSNMAVQGRNYIPGPSYRQQRVSTTVTQNNNSEIAWPGASSWALNGRNSLMNPGPAMASHKEGEDRFFPLSGSLIFGKQGTGRDNVDADKVMITNEEEIKTTNPVATESYGQVATNHQSAQAQAQTGWVQNQGILPGMVWQDRDVYLQGPIWAKIPHTDGNFHPSPLMGGFGMKHPPPQILIKNTPVPADPPTAFNKDKLNSFITQYSTGQVSVEIEWELQKENSKRWNPEIQYTSNYYKSNNVEFAVNTEGVYSEPRPIGTRYLTRNL

SEQ ID NO: 137 - protein, 736 aa, synthetic construct
MAADGYLPDWLEDNLSEGIREWWALKPGAPQPKANQQHQDNARGLVLPGYKYLGPGNGLDKGEPVNAADAAALEHDKAYDQQLKAGDNPYLKYNHADAEFQERLKEDTSFGGNLGRAVFQAKKRLLEPLGLVEEAAKTAPGKKRPVEQSPREPDSSAGIGKSGAQPAKKRLNFGQTGDTESVPDPQPIGEPPAAPSGVGSLTMASGGGAPVADNNEGADGVGSSSGNWHCDSQWLGDRVITTSTRTWALPTYNNHLYKQISNSTSGGSSNDNAYFGYSTPWGYFDFNRFHCHFSPRDWQRLINNNWGFRPKRLNFKLFNIQVKEVTDNNGVKTIANNLTSTVQVFTDSDYQLPYVLGSAHEGCLPPFPADVFMIPQYGYLTLNDGSQAVGRSSFYCLEYFPSQMLRTGNNFQFSYEFENVPFHSSYAHSQSLDRLMNPLIDQYLYYLSKTINGSGQNQQTLKFSVAGPSNMAVQGRNYIPGPSYRQQRVSTTVTQNNNSEFAWPRASSWALNGRNSLMNPGPAMASHKEGEDRFFPLSGSLIFGKQGTGRDNVDADKVMITNEEEIKTTNPVATESYGQVATNHQSAQAQAQTGWVQNQGILPGMVWQDRDVYLQGPIWAKIPHTDGNFHPSPLMGGFGMKHPPPQILIKNTPVPADPPTAFNKDKLNSFITQYSTGQVSVEIEWELQKENSKRWNPEIQYTSNYYKSNNVEFAVNTEGVYSEPRPIGTRYLTRNL

SEQ ID NO: 138 - protein, 736 aa, synthetic construct
MAADGYLPDWLEDNLSEGIREWWALKPGAPQPKANQQHQDNARGLVLPGYKYLGPGNGLDKGEPVNAADAAALEHDKAYDQQLKAGDNPYLKYNHADAEFQERLKEDTSFGGNLGRAVFQAKKRLLEPLGLVEEAAKTAPGKKRPVEQSPREPDSSAGIGKSGAQPAKKRLNFGQTGDTESVPDPQPIGEPPAAPSGVGSLTMASGGGAPVADNNEGADGVGSSSGNWHCDSQWLGDRVITTSTRTWALPTYNNHLYKQISNSTSGGSSNDNAYFGYSTPWGYFDFNRFHCHFSPRDWQRLINNNWGFRPKRLNFKLFNIQVKEVTDNNGVKTIANNLTSTVQVFTDSDYQLPYVLGSAHEGCLPPFPADVFMIPQYGYLTLNDGSQAVGRSSFYCLEYFPSQMLRTGNNFQFSYEFENVPFHSSYAHSQSLDRLMNPLIDQYLYYLSKTINGSGQNQQTLKFSVAGPSNMAVQGRNYIPGPSYRQQRVSTTVTQNNNSEFAWPGASSWALNGRNSLMNPGPAMASHKEGEDRFFPLSGSLIFGKQGTGRDNVDADKVMITNEEEIKTTNPVATESYGQVATNHQSAQAQAQTGWVQNQGILPGMVWQDRDVYLQGPIWAKIPHTDGNFHPSPLMGGFGMKHPPPQILIKNTPVPADPPTAFNKDKLNSFITQYSTGQVSVEIEWELQKENSKRWNPEIQYTSNYCKSNNVEFAVNTEGVYSEPRPIGTRYLTRNL

SEQ ID NO: 139 - protein, 736 aa, synthetic construct
MAADGYLPDWLEDNLSEGIREWWALKPGAPQPKANQQHQDNARGLVLPGYKYLGPGNGLDKGEPVNAADAAALEHDKAYDQQLKAGDNPYLKYNHADAEFQERLKEDTSFGGNLGRAVFQAKKRLLEPLGLVEEAAKTAPGKKRPVEQSPREPDSSAGIGKSGAQPAKKRLNFGQTGDTESVPDPQPIGEPPAAPSGVGSLTMASGGGAPVADNNEGADGVGSSSGNWHCDSQWLGDRVITTSTRTWALPTYNNHLYKQISNSTSGGSSNDNAYFGYSTPWGYFDFNRFHCHFSPRDWQRLINNNWGFRPKRLNFKLFNIQVKEVTDNNGVKTIANNLTSTVQVFTDSDYQLPYVLGSAHEGCLPPFPADVFMIPQYGYLTLNDGSQAVGRSSFYCLEYFPSQMLRTGNNFQFSYEFENVPFHSSYAHSQSLDRLMNPLIDQYLYYLSKTINGSGQNQQTLKFSVAGPSNMAVQGRNYIPGPSYRQQRVSTTVTQNNNSEIAWPRASSWALNGRNSLMNPGPAMASHKEGEDRFFPLSGSLIFGKQGTGRDNVDADKVMITNEEEIKTTNPVATESYGQVATNHQSAQAQAQTGWVQNQGILPGMVWQDRDVYLQGPIWAKIPHTDGNFHPSPLMGGFGMKHPPPQILIKNTPVPADPPTAFNKDKLNSFITQYSTGQVSVEIEWELQKENSKRWNPEIQYTSNYYKSNNVEFAVNTEGVYSEPRPIGTRYLTRNL

SEQ ID NO: 140 - protein, 736 aa, synthetic construct
MAADGYLPDWLEDNLSEGIREWWALKPGAPQPKANQQHQDNARGLVLPGYKYLGPGNGLDKGEPVNAADAAALEHDKAYDQQLKAGDNPYLKYNHADAEFQERLKEDTSFGGNLGRAVFQAKKRLLEPLGLVEEAAKTAPGKKRPVEQSPREPDSSAGIGKSGAQPAKKRLNFGQTGDTESVPDPQPIGEPPAAPSGVGSLTMASGGGAPVADNNEGADGVGSSSGNWHCDSQWLGDRVITTSTRTWALPTYNNHLYKQISNSTSGGSSNDNAYFGYSTPWGYFDFNRFHCHFSPRDWQRLINNNWGFRPKRLNFKLFNIQVKEVTDNNGVKTIANNLTSTVQVFTDSDYQLPYVLGSAHEGCLPPFPADVFMIPQYGYLTLNDGSQAVGRSSFYCLEYFPSQMLRTGNNFQFSYEFENVPFHSSYAHSQSLDRLMNPLIDQYLYYLSKTINGSGQNQQTLKFSVAGPSNMAVQGRNYIPGPSYRQQRVSTTVTQNNNSEIAWPGASSWALNGRNSLMNPGPAMASHKEGEDRFFPLSGSLIFGKQGTGRDNVDADKVMITNEEEIKTTNPVATESYGQVATNHQSAQAQAQTGWVQNQGILPGMVWQDRDVYLQGPIWAKIPHTDGNFHPSPLMGGFGMKHPPPQILIKNTPVPADPPTAFNKDKLNSFITQYSTGQVSVEIEWELQKENSKRWNPEIQYTSNYCKSNNVEFAVNTEGVYSEPRPIGTRYLTRNL

SEQ ID NO: 141 - protein, 736 aa, synthetic construct
MAADGYLPDWLEDNLSEGIREWWALKPGAPQPKANQQHQDNARGLVLPGYKYLGPGNGLDKGEPVNAADAAALEHDKAYDQQLKAGDNPYLKYNHADAEFQERLKEDTSFGGNLGRAVFQAKKRLLEPLGLVEEAAKTAPGKKRPVEQSPREPDSSAGIGKSGAQPAKKRLNFGQTGDTESVPDPQPIGEPPAAPSGVGSLTMASGGGAPVADNNEGADGVGSSSGNWHCDSQWLGDRVITTSTRTWALPTYNNHLYKQISNSTSGGSSNDNAYFGYSTPWGYFDFNRFHCHFSPRDWQRLINNNWGFRPKRLNFKLFNIQVKEVTDNNGVKTIANNLTSTVQVFTDSDYQLPYVLGSAHEGCLPPFPADVFMIPQYGYLTLNDGSQAVGRSSFYCLEYFPSQMLRTGNNFQFSYEFENVPFHSSYAHSQSLDRLMNPLIDQYLYYLSKTINGSGQNQQTLKFSVAGPSNMAVQGRNYIPGPSYRQQRVSTTVTQNNNSEFAWPRASSWALNGRNSLMNPGPAMASHKEGEDRFFPLSGSLIFGKQGTGRDNVDADKVMITNEEEIKTTNPVATESYGQVATNHQSAQAQAQTGWVQNQGILPGMVWQDRDVYLQGPIWAKIPHTDGNFHPSPLMGGFGMKHPPPQILIKNTPVPADPPTAFNKDKLNSFITQYSTGQVSVEIEWELQKENSKRWNPEIQYTSNYCKSNNVEFAVNTEGVYSEPRPIGTRYLTRNL

SEQ ID NO: 142 - protein, 736 aa, synthetic construct
MAADGYLPDWLEDNLSEGIREWWALKPGAPQPKANQQHQDNARGLVLPGYKYLGPGNGLDKGEPVNAADAAALEHDKAYDQQLKAGDNPYLKYNHADAEFQERLKEDTSFGGNLGRAVFQAKKRLLEPLGLVEEAAKTAPGKKRPVEQSPREPDSSAGIGKSGAQPAKKRLNFGQTGDTESVPDPQPIGEPPAAPSGVGSLTMASGGGAPVADNNEGADGVGSSSGNWHCDSQWLGDRVITTSTRTWALPTYNNHLYKQISNSTSGGSSNDNAYFGYSTPWGYFDFNRFHCHFSPRDWQRLINNNWGFRPKRLNFKLFNIQVKEVTDNNGVKTIANNLTSTVQVFTDSDYQLPYVLGSAHEGCLPPFPADVFMIPQYGYLTLNDGSQAVGRSSFYCLEYFPSQMLRTGNNFQFSYEFENVPFHSSYAHSQSLDRLMNPLIDQYLYYLSKTINGSGQNQQTLKFSVAGPSNMAVQGRNYIPGPSYRQQRVSTTVTQNNNSEIAWPRASSWALNGRNSLMNPGPAMASHKEGEDRFFPLSGSLIFGKQGTGRDNVDADKVMITNEEEIKTTNPVATESYGQVATNHQSAQAQAQTGWVQNQGILPGMVWQDRDVYLQGPIWAKIPHTDGNFHPSPLMGGFGMKHPPPQILIKNTPVPADPPTAFNKDKLNSFITQYSTGQVSVEIEWELQKENSKRWNPEIQYTSNYCKSNNVEFAVNTEGVYSEPRPIGTRYLTRNL

SEQ ID NO: 143 - protein, 736 aa, synthetic construct
MAADGYLPDWLEDNLSEGIREWWALKPGAPQPKANQQHQDNARGLVLPGYKYLGPGNGLDKGEPVNAADAAALEHDKAYDQQLKAGDNPYLKYNHADAEFQERLKEDTSFGGNLGRAVFQAKKRLLEPLGLVEEAAKTAPGKKRPVEQSPREPDSSAGIGKSGAQPAKKRLNFGQTGDTESVPDPQPIGEPPAAPSGVGSLTMASGGGAPVADNNEGADGVGSSSGNWHCDSQWLGDRVITTSTRTWALPTYNNHLYKQISNSTSGGSSNDNAYFGYSTPWGYFDFNRFHCHFSPRDWQRLINNNWGFRPKRLNFKLFNIQVKEVTDNNGVKTIANNLTSTVQVFADSDYQLPYVLGSAHEGCLPPFPADVFMIPQYGYLTLNDGSQAVGRSSFYCLEYFPSQMLRTGNNFQFSYEFENVPFHSSYAHSQSLDRLMNPLIDQYLYYLSKTINGSGQNQQTLKFSVAGPSNMAVQGRNYIPGPSYRQQRVSTTVTQNNNSEFAWPGASSWALNGRNSLMNPGPAMASHKEGEDRFFPLSGSLIFGKQGTGRDNVDADKVMITNEEEIKTTNPVATESYGQVATNHQSAQAQAQTGWVQNQGILPGMVWQDRDVYLQGPIWAKIPHTDGNFHPSPLMGGFGMKHPPPQILIKNTPVPADPPTAFNKDKLNSFITQYSTGQVSVEIEWELQKENSKRWNPEIQYTSNYYKSNNVEFAVNTEGVYSEPRPIGTRYLTRNL

SEQ ID NO: 144 - protein, 736 aa, synthetic construct
MAADGYLPDWLEDNLSEGIREWWALKPGAPQPKANQQHQDNARGLVLPGYKYLGPGNGLDKGEPVNAADAAALEHDKAYDQQLKAGDNPYLKYNHADAEFQERLKEDTSFGGNLGRAVFQAKKRLLEPLGLVEEAAKTAPGKKRPVEQSPREPDSSAGIGKSGAQPAKKRLNFGQTGDTESVPDPQPIGEPPAAPSGVGSLTMASGGGAPVADNNEGADGVGSSSGNWHCDSQWLGDRVITTSTRTWALPTYNNHLYKQISNSTSGGSSNDNAYFGYSTPWGYFDFNRFHCHFSPRDWQRLINNNWGFRPKRLNFKLFNIQVKEVTDNNGVKTIANNLTSTVQVFADSDYQLPYVLGSAHEGCLPPFPADVFMIPQYGYLTLNDGSQAVGRSSFYCLEYFPSQMLRTGNNFQFSYEFENVPFHSSYAHSQSLDRLMNPLIDQYLYYLSKTINGSGQNQQTLKFSVAGPSNMAVQGRNYIPGPSYRQQRVSTTVTQNNNSEIAWPGASSWALNGRNSLMNPGPAMASHKEGEDRFFPLSGSLIFGKQGTGRDNVDADKVMITNEEEIKTTNPVATESYGQVATNHQSAQAQAQTGWVQNQGILPGMVWQDRDVYLQGPIWAKIPHTDGNFHPSPLMGGFGMKHPPPQILIKNTPVPADPPTAFNKDKLNSFITQYSTGQVSVEIEWELQKENSKRWNPEIQYTSNYYKSNNVEFAVNTEGVYSEPRPIGTRYLTRNL

SEQ ID NO: 145 - protein, 736 aa, synthetic construct
MAADGYLPDWLEDNLSEGIREWWALKPGAPQPKANQQHQDNARGLVLPGYKYLGPGNGLDKGEPVNAADAAALEHDKAYDQQLKAGDNPYLKYNHADAEFQERLKEDTSFGGNLGRAVFQAKKRLLEPLGLVEEAAKTAPGKKRPVEQSPREPDSSAGIGKSGAQPAKKRLNFGQTGDTESVPDPQPIGEPPAAPSGVGSLTMASGGGAPVADNNEGADGVGSSSGNWHCDSQWLGDRVITTSTRTWALPTYNNHLYKQISNSTSGGSSNDNAYFGYSTPWGYFDFNRFHCHFSPRDWQRLINNNWGFRPKRLNFKLFNIQVKEVTDNNGVKTIANNLTSTVQVFADSDYQLPYVLGSAHEGCLPPFPADVFMIPQYGYLTLNDGSQAVGRSSFYCLEYFPSQMLRTGNNFQFSYEFENVPFHSSYAHSQSLDRLMNPLIDQYLYYLSKTINGSGQNQQTLKFSVAGPSNMAVQGRNYIPGPSYRQQRVSTTVTQNNNSEFAWPRASSWALNGRNSLMNPGPAMASHKEGEDRFFPLSGSLIFGKQGTGRDNVDADKVMITNEEEIKTTNPVATESYGQVATNHQSAQAQAQTGWVQNQGILPGMVWQDRDVYLQGPIWAKIPHTDGNFHPSPLMGGFGMKHPPPQILIKNTPVPADPPTAFNKDKLNSFITQYSTGQVSVEIEWELQKENSKRWNPEIQYTSNYYKSNNVEFAVNTEGVYSEPRPIGTRYLTRNL

SEQ ID NO: 146 - protein, 736 aa, synthetic construct
MAADGYLPDWLEDNLSEGIREWWALKPGAPQPKANQQHQDNARGLVLPGYKYLGPGNGLDKGEPVNAADAAALEHDKAYDQQLKAGDNPYLKYNHADAEFQERLKEDTSFGGNLGRAVFQAKKRLLEPLGLVEEAAKTAPGKKRPVEQSPREPDSSAGIGKSGAQPAKKRLNFGQTGDTESVPDPQPIGEPPAAPSGVGSLTMASGGGAPVADNNEGADGVGSSSGNWHCDSQWLGDRVITTSTRTWALPTYNNHLYKQISNSTSGGSSNDNAYFGYSTPWGYFDFNRFHCHFSPRDWQRLINNNWGFRPKRLNFKLFNIQVKEVTDNNGVKTIANNLTSTVQVFADSDYQLPYVLGSAHEGCLPPFPADVFMIPQYGYLTLNDGSQAVGRSSFYCLEYFPSQMLRTGNNFQFSYEFENVPFHSSYAHSQSLDRLMNPLIDQYLYYLSKTINGSGQNQQTLKFSVAGPSNMAVQGRNYIPGPSYRQQRVSTTVTQNNNSEFAWPGASSWALNGRNSLMNPGPAMASHKEGEDRFFPLSGSLIFGKQGTGRDNVDADKVMITNEEEIKTTNPVATESYGQVATNHQSAQAQAQTGWVQNQGILPGMVWQDRDVYLQGPIWAKIPHTDGNFHPSPLMGGFGMKHPPPQILIKNTPVPADPPTAFNKDKLNSFITQYSTGQVSVEIEWELQKENSKRWNPEIQYTSNYCKSNNVEFAVNTEGVYSEPRPIGTRYLTRNL

SEQ ID NO: 147 - protein, 736 aa, synthetic construct
MAADGYLPDWLEDNLSEGIREWWALKPGAPQPKANQQHQDNARGLVLPGYKYLGPGNGLDKGEPVNAADAAALEHDKAYDQQLKAGDNPYLKYNHADAEFQERLKEDTSFGGNLGRAVFQAKKRLLEPLGLVEEAAKTAPGKKRPVEQSPREPDSSAGIGKSGAQPAKKRLNFGQTGDTESVPDPQPIGEPPAAPSGVGSLTMASGGGAPVADNNEGADGVGSSSGNWHCDSQWLGDRVITTSTRTWALPTYNNHLYKQISNSTSGGSSNDNAYFGYSTPWGYFDFNRFHCHFSPRDWQRLINNNWGFRPKRLNFKLFNIQVKEVTDNNGVKTIANNLTSTVQVFADSDYQLPYVLGSAHEGCLPPFPADVFMIPQYGYLTLNDGSQAVGRSSFYCLEYFPSQMLRTGNNFQFSYEFENVPFHSSYAHSQSLDRLMNPLIDQYLYYLSKTINGSGQNQQTLKFSVAGPSNMAVQGRNYIPGPSYRQQRVSTTVTQNNNSEIAWPRASSWALNGRNSLMNPGPAMASHKEGEDRFFPLSGSLIFGKQGTGRDNVDADKVMITNEEEIKTTNPVATESYGQVATNHQSAQAQAQTGWVQNQGILPGMVWQDRDVYLQGPIWAKIPHTDGNFHPSPLMGGFGMKHPPPQILIKNTPVPADPPTAFNKDKLNSFITQYSTGQVSVEIEWELQKENSKRWNPEIQYTSNYYKSNNVEFAVNTEGVYSEPRPIGTRYLTRNL

SEQ ID NO: 148 - protein, 736 aa, synthetic construct
MAADGYLPDWLEDNLSEGIREWWALKPGAPQPKANQQHQDNARGLVLPGYKYLGPGNGLDKGEPVNAADAAALEHDKAYDQQLKAGDNPYLKYNHADAEFQERLKEDTSFGGNLGRAVFQAKKRLLEPLGLVEEAAKTAPGKKRPVEQSPREPDSSAGIGKSGAQPAKKRLNFGQTGDTESVPDPQPIGEPPAAPSGVGSLTMASGGGAPVADNNEGADGVGSSSGNWHCDSQWLGDRVITTSTRTWALPTYNNHLYKQISNSTSGGSSNDNAYFGYSTPWGYFDFNRFHCHFSPRDWQRLINNNWGFRPKRLNFKLFNIQVKEVTDNNGVKTIANNLTSTVQVFADSDYQLPYVLGSAHEGCLPPFPADVFMIPQYGYLTLNDGSQAVGRSSFYCLEYFPSQMLRTGNNFQFSYEFENVPFHSSYAHSQSLDRLMNPLIDQYLYYLSKTINGSGQNQQTLKFSVAGPSNMAVQGRNYIPGPSYRQQRVSTTVTQNNNSEIAWPGASSWALNGRNSLMNPGPAMASHKEGEDRFFPLSGSLIFGKQGTGRDNVDADKVMITNEEEIKTTNPVATESYGQVATNHQSAQAQAQTGWVQNQGILPGMVWQDRDVYLQGPIWAKIPHTDGNFHPSPLMGGFGMKHPPPQILIKNTPVPADPPTAFNKDKLNSFITQYSTGQVSVEIEWELQKENSKRWNPEIQYTSNYCKSNNVEFAVNTEGVYSEPRPIGTRYLTRNL

SEQ ID NO: 149 - protein, 736 aa, synthetic construct
MAADGYLPDWLEDNLSEGIREWWALKPGAPQPKANQQHQDNARGLVLPGYKYLGPGNGLDKGEPVNAADAAALEHDKAYDQQLKAGDNPYLKYNHADAEFQERLKEDTSFGGNLGRAVFQAKKRLLEPLGLVEEAAKTAPGKKRPVEQSPREPDSSAGIGKSGAQPAKKRLNFGQTGDTESVPDPQPIGEPPAAPSGVGSLTMASGGGAPVADNNEGADGVGSSSGNWHCDSQWLGDRVITTSTRTWALPTYNNHLYKQISNSTSGGSSNDNAYFGYSTPWGYFDFNRFHCHFSPRDWQRLINNNWGFRPKRLNFKLFNIQVKEVTDNNGVKTIANNLTSTVQVFADSDYQLPYVLGSAHEGCLPPFPADVFMIPQYGYLTLNDGSQAVGRSSFYCLEYFPSQMLRTGNNFQFSYEFENVPFHSSYAHSQSLDRLMNPLIDQYLYYLSKTINGSGQNQQTLKFSVAGPSNMAVQGRNYIPGPSYRQQRVSTTVTQNNNSEFAWPRASSWALNGRNSLMNPGPAMASHKEGEDRFFPLSGSLIFGKQGTGRDNVDADKVMITNEEEIKTTNPVATESYGQVATNHQSAQAQAQTGWVQNQGILPGMVWQDRDVYLQGPIWAKIPHTDGNFHPSPLMGGFGMKHPPPQILIKNTPVPADPPTAFNKDKLNSFITQYSTGQVSVEIEWELQKENSKRWNPEIQYTSNYCKSNNVEFAVNTEGVYSEPRPIGTRYLTRNL

SEQ ID NO: 150 - protein, 736 aa, synthetic construct
MAADGYLPDWLEDNLSEGIREWWALKPGAPQPKANQQHQDNARGLVLPGYKYLGPGNGLDKGEPVNAADAAALEHDKAYDQQLKAGDNPYLKYNHADAEFQERLKEDTSFGGNLGRAVFQAKKRLLEPLGLVEEAAKTAPGKKRPVEQSPREPDSSAGIGKSGAQPAKKRLNFGQTGDTESVPDPQPIGEPPAAPSGVGSLTMASGGGAPVADNNEGADGVGSSSGNWHCDSQWLGDRVITTSTRTWALPTYNNHLYKQISNSTSGGSSNDNAYFGYSTPWGYFDFNRFHCHFSPRDWQRLINNNWGFRPKRLNFKLFNIQVKEVTDNNGVKTIANNLTSTVQVFADSDYQLPYVLGSAHEGCLPPFPADVFMIPQYGYLTLNDGSQAVGRSSFYCLEYFPSQMLRTGNNFQFSYEFENVPFHSSYAHSQSLDRLMNPLIDQYLYYLSKTINGSGQNQQTLKFSVAGPSNMAVQGRNYIPGPSYRQQRVSTTVTQNNNSEIAWPRASSWALNGRNSLMNPGPAMASHKEGEDRFFPLSGSLIFGKQGTGRDNVDADKVMITNEEEIKTTNPVATESYGQVATNHQSAQAQAQTGWVQNQGILPGMVWQDRDVYLQGPIWAKIPHTDGNFHPSPLMGGFGMKHPPPQILIKNTPVPADPPTAFNKDKLNSFITQYSTGQVSVEIEWELQKENSKRWNPEIQYTSNYCKSNNVEFAVNTEGVYSEPRPIGTRYLTRNL

SEQ ID NO: 151 - protein, 736 aa, synthetic construct
MAADGYLPDWLEDNLSEGIREWWALKPGAPQPKANQQHQDNARGLVLPGYKYLGPGNGLDKGEPVNAADAAALEHDKAYDQQLKAGDNPYLKYNHADAEFQERLKEDTSFGGNLGRAVFQAKKRLLEPLGLVEEAAKTAPGKKRPVEQSPQEPDSSAGIGKSGAQPAKKRLNFGQTGDTESVPDPQPIGEPPAAPSGVGSLTMASCGGAPVADNNEGADGVGSSSGNWHCDSQWLGDRVITTSTRTWALPTYNNHLYKQISNSTSGGSSNDNAYFGYSTPWGYFDFNRFHCHFSPRDWQRLINNNWGFRPKRLNFKLFNIQVKEVTDNNGVKTIANNLTSTVQVFTDSDYQLPYVLGSAHEGCLPPFPADVFMIPQYGYLTLNDGSQAVGRSSFYCLEYFPSQMLRTGNNFQFSYEFENVPFHSSYAHSQSLDRLMNPLIDQYLYYLSKTINGSGQNQQTLKFSVAGPSNMAVQGRNYIPGPSYRQQRVSTTVTQNNNSEIAWPGASSWALNGRNSLMNPGPAMASHKEGEDRFFPLSGSLIFGKQGTGRDNVDADKVMITNEEEIKTTNPVATESYGQVATNHQSAQAQAQTGWVQNQGILPGMVWQDRDVYLQGPIWAKIPHTDGNFHPSPLMGGFGMKHPPPQILIKNTPVPADPPTAFNKDKLNSFITQYSTGQVSVEIEWELQKENSKRWNPEIQYTSNYYKSNNVEFAVNTEGVYSEPRPIGTRYLTRNL

SEQ ID NO: 152 - protein, 736 aa, synthetic construct
MAADGYLPDWLEDNLSEGIREWWALKPGAPQPKANQQHQDNARGLVLPGYKYLGPGNGLDKGEPVNAADAAALEHDKAYDQQLKAGDNPYLKYNHADAEFQERLKEDTSFGGNLGRAVFQAKKRLLEPLGLVEEAAKTAPGKKRPVEQSPQEPDSSAGIGKSGAQPAKKRLNFGQTGDTESVPDPQPIGEPPAAPSGVGSLTMASCGGAPVADNNEGADGVGSSSGNWHCDSQWLGDRVITTSTRTWALPTYNNHLYKQISNSTSGGSSNDNAYFGYSTPWGYFDFNRFHCHFSPRDWQRLINNNWGFRPKRLNFKLFNIQVKEVTDNNGVKTIANNLTSTVQVFTDSDYQLPYVLGSAHEGCLPPFPADVFMIPQYGYLTLNDGSQAVGRSSFYCLEYFPSQMLRTGNNFQFSYEFENVPFHSSYAHSQSLDRLMNPLIDQYLYYLSKTINGSGQNQQTLKFSVAGPSNMAVQGRNYIPGPSYRQQRVSTTVTQNNNSEFAWPRASSWALNGRNSLMNPGPAMASHKEGEDRFFPLSGSLIFGKQGTGRDNVDADKVMITNEEEIKTTNPVATESYGQVATNHQSAQAQAQTGWVQNQGILPGMVWQDRDVYLQGPIWAKIPHTDGNFHPSPLMGGFGMKHPPPQILIKNTPVPADPPTAFNKDKLNSFITQYSTGQVSVEIEWELQKENSKRWNPEIQYTSNYYKSNNVEFAVNTEGVYSEPRPIGTRYLTRNL

SEQ ID NO: 153 - protein, 736 aa, synthetic construct
MAADGYLPDWLEDNLSEGIREWWALKPGAPQPKANQQHQDNARGLVLPGYKYLGPGNGLDKGEPVNAADAAALEHDKAYDQQLKAGDNPYLKYNHADAEFQERLKEDTSFGGNLGRAVFQAKKRLLEPLGLVEEAAKTAPGKKRPVEQSPQEPDSSAGIGKSGAQPAKKRLNFGQTGDTESVPDPQPIGEPPAAPSGVGSLTMASCGGAPVADNNEGADGVGSSSGNWHCDSQWLGDRVITTSTRTWALPTYNNHLYKQISNSTSGGSSNDNAYFGYSTPWGYFDFNRFHCHFSPRDWQRLINNNWGFRPKRLNFKLFNIQVKEVTDNNGVKTIANNLTSTVQVFTDSDYQLPYVLGSAHEGCLPPFPADVFMIPQYGYLTLNDGSQAVGRSSFYCLEYFPSQMLRTGNNFQFSYEFENVPFHSSYAHSQSLDRLMNPLIDQYLYYLSKTINGSGQNQQTLKFSVAGPSNMAVQGRNYIPGPSYRQQRVSTTVTQNNNSEFAWPGASSWALNGRNSLMNPGPAMASHKEGEDRFFPLSGSLIFGKQGTGRDNVDADKVMITNEEEIKTTNPVATESYGQVATNHQSAQAQAQTGWVQNQGILPGMVWQDRDVYLQGPIWAKIPHTDGNFHPSPLMGGFGMKHPPPQILIKNTPVPADPPTAFNKDKLNSFITQYSTGQVSVEIEWELQKENSKRWNPEIQYTSNYCKSNNVEFAVNTEGVYSEPRPIGTRYLTRNL

SEQ ID NO: 154 - protein, 736 aa, synthetic construct
MAADGYLPDWLEDNLSEGIREWWALKPGAPQPKANQQHQDNARGLVLPGYKYLGPGNGLDKGEPVNAADAAALEHDKAYDQQLKAGDNPYLKYNHADAEFQERLKEDTSFGGNLGRAVFQAKKRLLEPLGLVEEAAKTAPGKKRPVEQSPQEPDSSAGIGKSGAQPAKKRLNFGQTGDTESVPDPQPIGEPPAAPSGVGSLTMASCGGAPVADNNEGADGVGSSSGNWHCDSQWLGDRVITTSTRTWALPTYNNHLYKQISNSTSGGSSNDNAYFGYSTPWGYFDFNRFHCHFSPRDWQRLINNNWGFRPKRLNFKLFNIQVKEVTDNNGVKTIANNLTSTVQVFTDSDYQLPYVLGSAHEGCLPPFPADVFMIPQYGYLTLNDGSQAVGRSSFYCLEYFPSQMLRTGNNFQFSYEFENVPFHSSYAHSQSLDRLMNPLIDQYLYYLSKTINGSGQNQQTLKFSVAGPSNMAVQGRNYIPGPSYRQQRVSTTVTQNNNSEIAWPRASSWALNGRNSLMNPGPAMASHKEGEDRFFPLSGSLIFGKQGTGRDNVDADKVMITNEEEIKTTNPVATESYGQVATNHQSAQAQAQTGWVQNQGILPGMVWQDRDVYLQGPIWAKIPHTDGNFHPSPLMGGFGMKHPPPQILIKNTPVPADPPTAFNKDKLNSFITQYSTGQVSVEIEWELQKENSKRWNPEIQYTSNYYKSNNVEFAVNTEGVYSEPRPIGTRYLTRNL

SEQ ID NO: 155 - protein, 736 aa, synthetic construct
MAADGYLPDWLEDNLSEGIREWWALKPGAPQPKANQQHQDNARGLVLPGYKYLGPGNGLDKGEPVNAADAAALEHDKAYDQQLKAGDNPYLKYNHADAEFQERLKEDTSFGGNLGRAVFQAKKRLLEPLGLVEEAAKTAPGKKRPVEQSPQEPDSSAGIGKSGAQPAKKRLNFGQTGDTESVPDPQPIGEPPAAPSGVGSLTMASCGGAPVADNNEGADGVGSSSGNWHCDSQWLGDRVITTSTRTWALPTYNNHLYKQISNSTSGGSSNDNAYFGYSTPWGYFDFNRFHCHFSPRDWQRLINNNWGFRPKRLNFKLFNIQVKEVTDNNGVKTIANNLTSTVQVFTDSDYQLPYVLGSAHEGCLPPFPADVFMIPQYGYLTLNDGSQAVGRSSFYCLEYFPSQMLRTGNNFQFSYEFENVPFHSSYAHSQSLDRLMNPLIDQYLYYLSKTINGSGQNQQTLKFSVAGPSNMAVQGRNYIPGPSYRQQRVSTTVTQNNNSEIAWPGASSWALNGRNSLMNPGPAMASHKEGEDRFFPLSGSLIFGKQGTGRDNVDADKVMITNEEEIKTTNPVATESYGQVATNHQSAQAQAQTGWVQNQGILPGMVWQDRDVYLQGPIWAKIPHTDGNFHPSPLMGGFGMKHPPPQILIKNTPVPADPPTAFNKDKLNSFITQYSTGQVSVEIEWELQKENSKRWNPEIQYTSNYCKSNNVEFAVNTEGVYSEPRPIGTRYLTRNL

SEQ ID NO: 156 - protein, 736 aa, synthetic construct
MAADGYLPDWLEDNLSEGIREWWALKPGAPQPKANQQHQDNARGLVLPGYKYLGPGNGLDKGEPVNAADAAALEHDKAYDQQLKAGDNPYLKYNHADAEFQERLKEDTSFGGNLGRAVFQAKKRLLEPLGLVEEAAKTAPGKKRPVEQSPQEPDSSAGIGKSGAQPAKKRLNFGQTGDTESVPDPQPIGEPPAAPSGVGSLTMASCGGAPVADNNEGADGVGSSSGNWHCDSQWLGDRVITTSTRTWALPTYNNHLYKQISNSTSGGSSNDNAYFGYSTPWGYFDFNRFHCHFSPRDWQRLINNNWGFRPKRLNFKLFNIQVKEVTDNNGVKTIANNLTSTVQVFTDSDYQLPYVLGSAHEGCLPPFPADVFMIPQYGYLTLNDGSQAVGRSSFYCLEYFPSQMLRTGNNFQFSYEFENVPFHSSYAHSQSLDRLMNPLIDQYLYYLSKTINGSGQNQQTLKFSVAGPSNMAVQGRNYIPGPSYRQQRVSTTVTQNNNSEFAWPRASSWALNGRNSLMNPGPAMASHKEGEDRFFPLSGSLIFGKQGTGRDNVDADKVMITNEEEIKTTNPVATESYGQVATNHQSAQAQAQTGWVQNQGILPGMVWQDRDVYLQGPIWAKIPHTDGNFHPSPLMGGFGMKHPPPQILIKNTPVPADPPTAFNKDKLNSFITQYSTGQVSVEIEWELQKENSKRWNPEIQYTSNYCKSNNVEFAVNTEGVYSEPRPIGTRYLTRNL

SEQ ID NO: 157 - protein, 736 aa, synthetic construct
MAADGYLPDWLEDNLSEGIREWWALKPGAPQPKANQQHQDNARGLVLPGYKYLGPGNGLDKGEPVNAADAAALEHDKAYDQQLKAGDNPYLKYNHADAEFQERLKEDTSFGGNLGRAVFQAKKRLLEPLGLVEEAAKTAPGKKRPVEQSPQEPDSSAGIGKSGAQPAKKRLNFGQTGDTESVPDPQPIGEPPAAPSGVGSLTMASCGGAPVADNNEGADGVGSSSGNWHCDSQWLGDRVITTSTRTWALPTYNNHLYKQISNSTSGGSSNDNAYFGYSTPWGYFDFNRFHCHFSPRDWQRLINNNWGFRPKRLNFKLFNIQVKEVTDNNGVKTIANNLTSTVQVFTDSDYQLPYVLGSAHEGCLPPFPADVFMIPQYGYLTLNDGSQAVGRSSFYCLEYFPSQMLRTGNNFQFSYEFENVPFHSSYAHSQSLDRLMNPLIDQYLYYLSKTINGSGQNQQTLKFSVAGPSNMAVQGRNYIPGPSYRQQRVSTTVTQNNNSEIAWPRASSWALNGRNSLMNPGPAMASHKEGEDRFFPLSGSLIFGKQGTGRDNVDADKVMITNEEEIKTTNPVATESYGQVATNHQSAQAQAQTGWVQNQGILPGMVWQDRDVYLQGPIWAKIPHTDGNFHPSPLMGGFGMKHPPPQILIKNTPVPADPPTAFNKDKLNSFITQYSTGQVSVEIEWELQKENSKRWNPEIQYTSNYCKSNNVEFAVNTEGVYSEPRPIGTRYLTRNL

SEQ ID NO: 158 - protein, 736 aa, synthetic construct
MAADGYLPDWLEDNLSEGIREWWALKPGAPQPKANQQHQDNARGLVLPGYKYLGPGNGLDKGEPVNAADAAALEHDKAYDQQLKAGDNPYLKYNHADAEFQERLKEDTSFGGNLGRAVFQAKKRLLEPLGLVEEAAKTAPGKKRPVEQSPQEPDSSAGIGKSGAQPAKKRLNFGQTGDTESVPDPQPIGEPPAAPSGVGSLTMASCGGAPVADNNEGADGVGSSSGNWHCDSQWLGDRVITTSTRTWALPTYNNHLYKQISNSTSGGSSNDNAYFGYSTPWGYFDFNRFHCHFSPRDWQRLINNNWGFRPKRLNFKLFNIQVKEVTDNNGVKTIANNLTSTVQVFADSDYQLPYVLGSAHEGCLPPFPADVFMIPQYGYLTLNDGSQAVGRSSFYCLEYFPSQMLRTGNNFQFSYEFENVPFHSSYAHSQSLDRLMNPLIDQYLYYLSKTINGSGQNQQTLKFSVAGPSNMAVQGRNYIPGPSYRQQRVSTTVTQNNNSEFAWPGASSWALNGRNSLMNPGPAMASHKEGEDRFFPLSGSLIFGKQGTGRDNVDADKVMITNEEEIKTTNPVATESYGQVATNHQSAQAQAQTGWVQNQGILPGMVWQDRDVYLQGPIWAKIPHTDGNFHPSPLMGGFGMKHPPPQILIKNTPVPADPPTAFNKDKLNSFITQYSTGQVSVEIEWELQKENSKRWNPEIQYTSNYYKSNNVEFAVNTEGVYSEPRPIGTRYLTRNL

SEQ ID NO: 159 - protein, 736 aa, synthetic construct
MAADGYLPDWLEDNLSEGIREWWALKPGAPQPKANQQHQDNARGLVLPGYKYLGPGNGLDKGEPVNAADAAALEHDKAYDQQLKAGDNPYLKYNHADAEFQERLKEDTSFGGNLGRAVFQAKKRLLEPLGLVEEAAKTAPGKKRPVEQSPQEPDSSAGIGKSGAQPAKKRLNFGQTGDTESVPDPQPIGEPPAAPSGVGSLTMASCGGAPVADNNEGADGVGSSSGNWHCDSQWLGDRVITTSTRTWALPTYNNHLYKQISNSTSGGSSNDNAYFGYSTPWGYFDFNRFHCHFSPRDWQRLINNNWGFRPKRLNFKLFNIQVKEVTDNNGVKTIANNLTSTVQVFADSDYQLPYVLGSAHEGCLPPFPADVFMIPQYGYLTLNDGSQAVGRSSFYCLEYFPSQMLRTGNNFQFSYEFENVPFHSSYAHSQSLDRLMNPLIDQYLYYLSKTINGSGQNQQTLKFSVAGPSNMAVQGRNYIPGPSYRQQRVSTTVTQNNNSEIAWPGASSWALNGRNSLMNPGPAMASHKEGEDRFFPLSGSLIFGKQGTGRDNVDADKVMITNEEEIKTTNPVATESYGQVATNHQSAQAQAQTGWVQNQGILPGMVWQDRDVYLQGPIWAKIPHTDGNFHPSPLMGGFGMKHPPPQILIKNTPVPADPPTAFNKDKLNSFITQYSTGQVSVEIEWELQKENSKRWNPEIQYTSNYYKSNNVEFAVNTEGVYSEPRPIGTRYLTRNL

SEQ ID NO: 160 - protein, 736 aa, synthetic construct
MAADGYLPDWLEDNLSEGIREWWALKPGAPQPKANQQHQDNARGLVLPGYKYLGPGNGLDKGEPVNAADAAALEHDKAYDQQLKAGDNPYLKYNHADAEFQERLKEDTSFGGNLGRAVFQAKKRLLEPLGLVEEAAKTAPGKKRPVEQSPQEPDSSAGIGKSGAQPAKKRLNFGQTGDTESVPDPQPIGEPPAAPSGVGSLTMASCGGAPVADNNEGADGVGSSSGNWHCDSQWLGDRVITTSTRTWALPTYNNHLYKQISNSTSGGSSNDNAYFGYSTPWGYFDFNRFHCHFSPRDWQRLINNNWGFRPKRLNFKLFNIQVKEVTDNNGVKTIANNLTSTVQVFADSDYQLPYVLGSAHEGCLPPFPADVFMIPQYGYLTLNDGSQAVGRSSFYCLEYFPSQMLRTGNNFQFSYEFENVPFHSSYAHSQSLDRLMNPLIDQYLYYLSKTINGSGQNQQTLKFSVAGPSNMAVQGRNYIPGPSYRQQRVSTTVTQNNNSEFAWPRASSWALNGRNSLMNPGPAMASHKEGEDRFFPLSGSLIFGKQGTGRDNVDADKVMITNEEEIKTTNPVATESYGQVATNHQSAQAQAQTGWVQNQGILPGMVWQDRDVYLQGPIWAKIPHTDGNFHPSPLMGGFGMKHPPPQILIKNTPVPADPPTAFNKDKLNSFITQYSTGQVSVEIEWELQKENSKRWNPEIQYTSNYYKSNNVEFAVNTEGVYSEPRPIGTRYLTRNL

SEQ ID NO: 161 - protein, 736 aa, synthetic construct
MAADGYLPDWLEDNLSEGIREWWALKPGAPQPKANQQHQDNARGLVLPGYKYLGPGNGLDKGEPVNAADAAALEHDKAYDQQLKAGDNPYLKYNHADAEFQERLKEDTSFGGNLGRAVFQAKKRLLEPLGLVEEAAKTAPGKKRPVEQSPQEPDSSAGIGKSGAQPAKKRLNFGQTGDTESVPDPQPIGEPPAAPSGVGSLTMASCGGAPVADNNEGADGVGSSSGNWHCDSQWLGDRVITTSTRTWALPTYNNHLYKQISNSTSGGSSNDNAYFGYSTPWGYFDFNRFHCHFSPRDWQRLINNNWGFRPKRLNFKLFNIQVKEVTDNNGVKTIANNLTSTVQVFADSDYQLPYVLGSAHEGCLPPFPADVFMIPQYGYLTLNDGSQAVGRSSFYCLEYFPSQMLRTGNNFQFSYEFENVPFHSSYAHSQSLDRLMNPLIDQYLYYLSKTINGSGQNQQTLKFSVAGPSNMAVQGRNYIPGPSYRQQRVSTTVTQNNNSEFAWPGASSWALNGRNSLMNPGPAMASHKEGEDRFFPLSGSLIFGKQGTGRDNVDADKVMITNEEEIKTTNPVATESYGQVATNHQSAQAQAQTGWVQNQGILPGMVWQDRDVYLQGPIWAKIPHTDGNFHPSPLMGGFGMKHPPPQILIKNTPVPADPPTAFNKDKLNSFITQYSTGQVSVEIEWELQKENSKRWNPEIQYTSNYCKSNNVEFAVNTEGVYSEPRPIGTRYLTRNL

SEQ ID NO: 162 - protein, 736 aa, synthetic construct
MAADGYLPDWLEDNLSEGIREWWALKPGAPQPKANQQHQDNARGLVLPGYKYLGPGNGLDKGEPVNAADAAALEHDKAYDQQLKAGDNPYLKYNHADAEFQERLKEDTSFGGNLGRAVFQAKKRLLEPLGLVEEAAKTAPGKKRPVEQSPQEPDSSAGIGKSGAQPAKKRLNFGQTGDTESVPDPQPIGEPPAAPSGVGSLTMASCGGAPVADNNEGADGVGSSSGNWHCDSQWLGDRVITTSTRTWALPTYNNHLYKQISNSTSGGSSNDNAYFGYSTPWGYFDFNRFHCHFSPRDWQRLINNNWGFRPKRLNFKLFNIQVKEVTDNNGVKTIANNLTSTVQVFADSDYQLPYVLGSAHEGCLPPFPADVFMIPQYGYLTLNDGSQAVGRSSFYCLEYFPSQMLRTGNNFQFSYEFENVPFHSSYAHSQSLDRLMNPLIDQYLYYLSKTINGSGQNQQTLKFSVAGPSNMAVQGRNYIPGPSYRQQRVSTTVTQNNNSEIAWPRASSWALNGRNSLMNPGPAMASHKEGEDRFFPLSGSLIFGKQGTGRDNVDADKVMITNEEEIKTTNPVATESYGQVATNHQSAQAQAQTGWVQNQGILPGMVWQDRDVYLQGPIWAKIPHTDGNFHPSPLMGGFGMKHPPPQILIKNTPVPADPPTAFNKDKLNSFITQYSTGQVSVEIEWELQKENSKRWNPEIQYTSNYYKSNNVEFAVNTEGVYSEPRPIGTRYLTRNL

SEQ ID NO: 163 - protein, 736 aa, synthetic construct
MAADGYLPDWLEDNLSEGIREWWALKPGAPQPKANQQHQDNARGLVLPGYKYLGPGNGLDKGEPVNAADAAALEHDKAYDQQLKAGDNPYLKYNHADAEFQERLKEDTSFGGNLGRAVFQAKKRLLEPLGLVEEAAKTAPGKKRPVEQSPQEPDSSAGIGKSGAQPAKKRLNFGQTGDTESVPDPQPIGEPPAAPSGVGSLTMASCGGAPVADNNEGADGVGSSSGNWHCDSQWLGDRVITTSTRTWALPTYNNHLYKQISNSTSGGSSNDNAYFGYSTPWGYFDFNRFHCHFSPRDWQRLINNNWGFRPKRLNFKLFNIQVKEVTDNNGVKTIANNLTSTVQVFADSDYQLPYVLGSAHEGCLPPFPADVFMIPQYGYLTLNDGSQAVGRSSFYCLEYFPSQMLRTGNNFQFSYEFENVPFHSSYAHSQSLDRLMNPLIDQYLYYLSKTINGSGQNQQTLKFSVAGPSNMAVQGRNYIPGPSYRQQRVSTTVTQNNNSEIAWPGASSWALNGRNSLMNPGPAMASHKEGEDRFFPLSGSLIFGKQGTGRDNVDADKVMITNEEEIKTTNPVATESYGQVATNHQSAQAQAQTGWVQNQGILPGMVWQDRDVYLQGPIWAKIPHTDGNFHPSPLMGGFGMKHPPPQILIKNTPVPADPPTAFNKDKLNSFITQYSTGQVSVEIEWELQKENSKRWNPEIQYTSNYCKSNNVEFAVNTEGVYSEPRPIGTRYLTRNL

SEQ ID NO: 164 - protein, 736 aa, synthetic construct
MAADGYLPDWLEDNLSEGIREWWALKPGAPQPKANQQHQDNARGLVLPGYKYLGPGNGLDKGEPVNAADAAALEHDKAYDQQLKAGDNPYLKYNHADAEFQERLKEDTSFGGNLGRAVFQAKKRLLEPLGLVEEAAKTAPGKKRPVEQSPQEPDSSAGIGKSGAQPAKKRLNFGQTGDTESVPDPQPIGEPPAAPSGVGSLTMASCGGAPVADNNEGADGVGSSSGNWHCDSQWLGDRVITTSTRTWALPTYNNHLYKQISNSTSGGSSNDNAYFGYSTPWGYFDFNRFHCHFSPRDWQRLINNNWGFRPKRLNFKLFNIQVKEVTDNNGVKTIANNLTSTVQVFADSDYQLPYVLGSAHEGCLPPFPADVFMIPQYGYLTLNDGSQAVGRSSFYCLEYFPSQMLRTGNNFQFSYEFENVPFHSSYAHSQSLDRLMNPLIDQYLYYLSKTINGSGQNQQTLKFSVAGPSNMAVQGRNYIPGPSYRQQRVSTTVTQNNNSEFAWPRASSWALNGRNSLMNPGPAMASHKEGEDRFFPLSGSLIFGKQGTGRDNVDADKVMITNEEEIKTTNPVATESYGQVATNHQSAQAQAQTGWVQNQGILPGMVWQDRDVYLQGPIWAKIPHTDGNFHPSPLMGGFGMKHPPPQILIKNTPVPADPPTAFNKDKLNSFITQYSTGQVSVEIEWELQKENSKRWNPEIQYTSNYCKSNNVEFAVNTEGVYSEPRPIGTRYLTRNL

SEQ ID NO: 165 - protein, 736 aa, synthetic construct
MAADGYLPDWLEDNLSEGIREWWALKPGAPQPKANQQHQDNARGLVLPGYKYLGPGNGLDKGEPVNAADAAALEHDKAYDQQLKAGDNPYLKYNHADAEFQERLKEDTSFGGNLGRAVFQAKKRLLEPLGLVEEAAKTAPGKKRPVEQSPQEPDSSAGIGKSGAQPAKKRLNFGQTGDTESVPDPQPIGEPPAAPSGVGSLTMASCGGAPVADNNEGADGVGSSSGNWHCDSQWLGDRVITTSTRTWALPTYNNHLYKQISNSTSGGSSNDNAYFGYSTPWGYFDFNRFHCHFSPRDWQRLINNNWGFRPKRLNFKLFNIQVKEVTDNNGVKTIANNLTSTVQVFADSDYQLPYVLGSAHEGCLPPFPADVFMIPQYGYLTLNDGSQAVGRSSFYCLEYFPSQMLRTGNNFQFSYEFENVPFHSSYAHSQSLDRLMNPLIDQYLYYLSKTINGSGQNQQTLKFSVAGPSNMAVQGRNYIPGPSYRQQRVSTTVTQNNNSEIAWPRASSWALNGRNSLMNPGPAMASHKEGEDRFFPLSGSLIFGKQGTGRDNVDADKVMITNEEEIKTTNPVATESYGQVATNHQSAQAQAQTGWVQNQGILPGMVWQDRDVYLQGPIWAKIPHTDGNFHPSPLMGGFGMKHPPPQILIKNTPVPADPPTAFNKDKLNSFITQYSTGQVSVEIEWELQKENSKRWNPEIQYTSNYCKSNNVEFAVNTEGVYSEPRPIGTRYLTRNL

SEQ ID NO: 166 - protein, 736 aa, synthetic construct
MAADGYLPDWLEDNLSEGIREWWALKPGAPQPKANQQHQDNARGLVLPGYKYLGPGNGLDKGEPINAADAAALEHDKAYDQQLKAGDNPYLKYNHADAEFQERLKEDTSFGGNLGRAVFQAKKRLLEPLGLVEEAAKTAPGKKRPVEQSPQEPDSSAGIGKSGAQPAKKRLNFGQTGDTESVPDPQPIGEPPAAPSGVGSLTMASGGGAPVADNNEGADGVGSSSGNWHCDSQWLGDRVITTSTRTWALPTYNNHLYKQISNSTSGGSSNDNAYFGYSTPWGYFDFNRFHCHFSPRDWQRLINNNWGFRPKRLNFKLFNIQVKEVTDNNGVKTIANNLTSTVQVFTDSDYQLPYVLGSAHEGCLPPFPADVFMIPQYGYLTLNDGSQAVGRSSFYCLEYFPSQMLRTGNNFQFSYEFENVPFHSSYAHSQSLDRLMNPLIDQYLYYLSKTINGSGQNQQTLKFSVAGPSNMAVQGRNYIPGPSYRQQRVSTTVTQNNNSEIAWPGASSWALNGRNSLMNPGPAMASHKEGEDRFFPLSGSLIFGKQGTGRDNVDADKVMITNEEEIKTTNPVATESYGQVATNHQSAQAQAQTGWVQNQGILPGMVWQDRDVYLQGPIWAKIPHTYGNFHPSPLMGGFGMKHPPPQILIKNTPVPADPPTAFNKDKLNSFITQYSTGQVSVEIEWELQKENSKRWNPEIQYTSNYYKSNNVEFAVNTEGVYSEPRPIGTRYLTRNL

SEQ ID NO: 167 - protein, 736 aa, synthetic construct
MAADGYLPDWLEDNLSEGIREWWALKPGAPQPKANQQHQDNARGLVLPGYKYLGPGNGLDKGEPINAADAAALEHDKAYDQQLKAGDNPYLKYNHADAEFQERLKEDTSFGGNLGRAVFQAKKRLLEPLGLVEEAAKTAPGKKRPVEQSPQEPDSSAGIGKSGAQPAKKRLNFGQTGDTESVPDPQPIGEPPAAPSGVGSLTMASGGGAPVADNNEGADGVGSSSGNWHCDSQWLGDRVITTSTRTWALPTYNNHLYKQISNSTSGGSSNDNAYFGYSTPWGYFDFNRFHCHFSPRDWQRLINNNWGFRPKRLNFKLFNIQVKEVTDNNGVKTIANNLTSTVQVFTDSDYQLPYVLGSAHEGCLPPFPADVFMIPQYGYLTLNDGSQAVGRSSFYCLEYFPSQMLRTGNNFQFSYEFENVPFHSSYAHSQSLDRLMNPLIDQYLYYLSKTINGSGQNQQTLKFSVAGPSNMAVQGRNYIPGPSYRQQRVSTTVTQNNNSEFAWPRASSWALNGRNSLMNPGPAMASHKEGEDRFFPLSGSLIFGKQGTGRDNVDADKVMITNEEEIKTTNPVATESYGQVATNHQSAQAQAQTGWVQNQGILPGMVWQDRDVYLQGPIWAKIPHTYGNFHPSPLMGGFGMKHPPPQILIKNTPVPADPPTAFNKDKLNSFITQYSTGQVSVEIEWELQKENSKRWNPEIQYTSNYYKSNNVEFAVNTEGVYSEPRPIGTRYLTRNL

SEQ ID NO: 168 - protein, 736 aa, synthetic construct
MAADGYLPDWLEDNLSEGIREWWALKPGAPQPKANQQHQDNARGLVLPGYKYLGPGNGLDKGEPINAADAAALEHDKAYDQQLKAGDNPYLKYNHADAEFQERLKEDTSFGGNLGRAVFQAKKRLLEPLGLVEEAAKTAPGKKRPVEQSPQEPDSSAGIGKSGAQPAKKRLNFGQTGDTESVPDPQPIGEPPAAPSGVGSLTMASGGGAPVADNNEGADGVGSSSGNWHCDSQWLGDRVITTSTRTWALPTYNNHLYKQISNSTSGGSSNDNAYFGYSTPWGYFDFNRFHCHFSPRDWQRLINNNWGFRPKRLNFKLFNIQVKEVTDNNGVKTIANNLTSTVQVFTDSDYQLPYVLGSAHEGCLPPFPADVFMIPQYGYLTLNDGSQAVGRSSFYCLEYFPSQMLRTGNNFQFSYEFENVPFHSSYAHSQSLDRLMNPLIDQYLYYLSKTINGSGQNQQTLKFSVAGPSNMAVQGRNYIPGPSYRQQRVSTTVTQNNNSEFAWPGASSWALNGRNSLMNPGPAMASHKEGEDRFFPLSGSLIFGKQGTGRDNVDADKVMITNEEEIKTTNPVATESYGQVATNHQSAQAQAQTGWVQNQGILPGMVWQDRDVYLQGPIWAKIPHTYGNFHPSPLMGGFGMKHPPPQILIKNTPVPADPPTAFNKDKLNSFITQYSTGQVSVEIEWELQKENSKRWNPEIQYTSNYCKSNNVEFAVNTEGVYSEPRPIGTRYLTRNL

SEQ ID NO: 169 - protein, 736 aa, synthetic construct
MAADGYLPDWLEDNLSEGIREWWALKPGAPQPKANQQHQDNARGLVLPGYKYLGPGNGLDKGEPINAADAAALEHDKAYDQQLKAGDNPYLKYNHADAEFQERLKEDTSFGGNLGRAVFQAKKRLLEPLGLVEEAAKTAPGKKRPVEQSPQEPDSSAGIGKSGAQPAKKRLNFGQTGDTESVPDPQPIGEPPAAPSGVGSLTMASGGGAPVADNNEGADGVGSSSGNWHCDSQWLGDRVITTSTRTWALPTYNNHLYKQISNSTSGGSSNDNAYFGYSTPWGYFDFNRFHCHFSPRDWQRLINNNWGFRPKRLNFKLFNIQVKEVTDNNGVKTIANNLTSTVQVFTDSDYQLPYVLGSAHEGCLPPFPADVFMIPQYGYLTLNDGSQAVGRSSFYCLEYFPSQMLRTGNNFQFSYEFENVPFHSSYAHSQSLDRLMNPLIDQYLYYLSKTINGSGQNQQTLKFSVAGPSNMAVQGRNYIPGPSYRQQRVSTTVTQNNNSEIAWPRASSWALNGRNSLMNPGPAMASHKEGEDRFFPLSGSLIFGKQGTGRDNVDADKVMITNEEEIKTTNPVATESYGQVATNHQSAQAQAQTGWVQNQGILPGMVWQDRDVYLQGPIWAKIPHTYGNFHPSPLMGGFGMKHPPPQILIKNTPVPADPPTAFNKDKLNSFITQYSTGQVSVEIEWELQKENSKRWNPEIQYTSNYYKSNNVEFAVNTEGVYSEPRPIGTRYLTRNL

SEQ ID NO: 170 - protein, 736 aa, synthetic construct
MAADGYLPDWLEDNLSEGIREWWALKPGAPQPKANQQHQDNARGLVLPGYKYLGPGNGLDKGEPINAADAAALEHDKAYDQQLKAGDNPYLKYNHADAEFQERLKEDTSFGGNLGRAVFQAKKRLLEPLGLVEEAAKTAPGKKRPVEQSPQEPDSSAGIGKSGAQPAKKRLNFGQTGDTESVPDPQPIGEPPAAPSGVGSLTMASGGGAPVADNNEGADGVGSSSGNWHCDSQWLGDRVITTSTRTWALPTYNNHLYKQISNSTSGGSSNDNAYFGYSTPWGYFDFNRFHCHFSPRDWQRLINNNWGFRPKRLNFKLFNIQVKEVTDNNGVKTIANNLTSTVQVFTDSDYQLPYVLGSAHEGCLPPFPADVFMIPQYGYLTLNDGSQAVGRSSFYCLEYFPSQMLRTGNNFQFSYEFENVPFHSSYAHSQSLDRLMNPLIDQYLYYLSKTINGSGQNQQTLKFSVAGPSNMAVQGRNYIPGPSYRQQRVSTTVTQNNNSEIAWPGASSWALNGRNSLMNPGPAMASHKEGEDRFFPLSGSLIFGKQGTGRDNVDADKVMITNEEEIKTTNPVATESYGQVATNHQSAQAQAQTGWVQNQGILPGMVWQDRDVYLQGPIWAKIPHTYGNFHPSPLMGGFGMKHPPPQILIKNTPVPADPPTAFNKDKLNSFITQYSTGQVSVEIEWELQKENSKRWNPEIQYTSNYCKSNNVEFAVNTEGVYSEPRPIGTRYLTRNL

SEQ ID NO: 171 - protein, 736 aa, synthetic construct
MAADGYLPDWLEDNLSEGIREWWALKPGAPQPKANQQHQDNARGLVLPGYKYLGPGNGLDKGEPINAADAAALEHDKAYDQQLKAGDNPYLKYNHADAEFQERLKEDTSFGGNLGRAVFQAKKRLLEPLGLVEEAAKTAPGKKRPVEQSPQEPDSSAGIGKSGAQPAKKRLNFGQTGDTESVPDPQPIGEPPAAPSGVGSLTMASGGGAPVADNNEGADGVGSSSGNWHCDSQWLGDRVITTSTRTWALPTYNNHLYKQISNSTSGGSSNDNAYFGYSTPWGYFDFNRFHCHFSPRDWQRLINNNWGFRPKRLNFKLFNIQVKEVTDNNGVKTIANNLTSTVQVFTDSDYQLPYVLGSAHEGCLPPFPADVFMIPQYGYLTLNDGSQAVGRSSFYCLEYFPSQMLRTGNNFQFSYEFENVPFHSSYAHSQSLDRLMNPLIDQYLYYLSKTINGSGQNQQTLKFSVAGPSNMAVQGRNYIPGPSYRQQRVSTTVTQNNNSEFAWPRASSWALNGRNSLMNPGPAMASHKEGEDRFFPLSGSLIFGKQGTGRDNVDADKVMITNEEEIKTTNPVATESYGQVATNHQSAQAQAQTGWVQNQGILPGMVWQDRDVYLQGPIWAKIPHTYGNFHPSPLMGGFGMKHPPPQILIKNTPVPADPPTAFNKDKLNSFITQYSTGQVSVEIEWELQKENSKRWNPEIQYTSNYCKSNNVEFAVNTEGVYSEPRPIGTRYLTRNL

SEQ ID NO: 172 - protein, 736 aa, synthetic construct
MAADGYLPDWLEDNLSEGIREWWALKPGAPQPKANQQHQDNARGLVLPGYKYLGPGNGLDKGEPINAADAAALEHDKAYDQQLKAGDNPYLKYNHADAEFQERLKEDTSFGGNLGRAVFQAKKRLLEPLGLVEEAAKTAPGKKRPVEQSPQEPDSSAGIGKSGAQPAKKRLNFGQTGDTESVPDPQPIGEPPAAPSGVGSLTMASGGGAPVADNNEGADGVGSSSGNWHCDSQWLGDRVITTSTRTWALPTYNNHLYKQISNSTSGGSSNDNAYFGYSTPWGYFDFNRFHCHFSPRDWQRLINNNWGFRPKRLNFKLFNIQVKEVTDNNGVKTIANNLTSTVQVFTDSDYQLPYVLGSAHEGCLPPFPADVFMIPQYGYLTLNDGSQAVGRSSFYCLEYFPSQMLRTGNNFQFSYEFENVPFHSSYAHSQSLDRLMNPLIDQYLYYLSKTINGSGQNQQTLKFSVAGPSNMAVQGRNYIPGPSYRQQRVSTTVTQNNNSEIAWPRASSWALNGRNSLMNPGPAMASHKEGEDRFFPLSGSLIFGKQGTGRDNVDADKVMITNEEEIKTTNPVATESYGQVATNHQSAQAQAQTGWVQNQGILPGMVWQDRDVYLQGPIWAKIPHTYGNFHPSPLMGGFGMKHPPPQILIKNTPVPADPPTAFNKDKLNSFITQYSTGQVSVEIEWELQKENSKRWNPEIQYTSNYCKSNNVEFAVNTEGVYSEPRPIGTRYLTRNL

SEQ ID NO: 173 - protein, 736 aa, synthetic construct
MAADGYLPDWLEDNLSEGIREWWALKPGAPQPKANQQHQDNARGLVLPGYKYLGPGNGLDKGEPINAADAAALEHDKAYDQQLKAGDNPYLKYNHADAEFQERLKEDTSFGGNLGRAVFQAKKRLLEPLGLVEEAAKTAPGKKRPVEQSPQEPDSSAGIGKSGAQPAKKRLNFGQTGDTESVPDPQPIGEPPAAPSGVGSLTMASGGGAPVADNNEGADGVGSSSGNWHCDSQWLGDRVITTSTRTWALPTYNNHLYKQISNSTSGGSSNDNAYFGYSTPWGYFDFNRFHCHFSPRDWQRLINNNWGFRPKRLNFKLFNIQVKEVTDNNGVKTIANNLTSTVQVFADSDYQLPYVLGSAHEGCLPPFPADVFMIPQYGYLTLNDGSQAVGRSSFYCLEYFPSQMLRTGNNFQFSYEFENVPFHSSYAHSQSLDRLMNPLIDQYLYYLSKTINGSGQNQQTLKFSVAGPSNMAVQGRNYIPGPSYRQQRVSTTVTQNNNSEFAWPGASSWALNGRNSLMNPGPAMASHKEGEDRFFPLSGSLIFGKQGTGRDNVDADKVMITNEEEIKTTNPVATESYGQVATNHQSAQAQAQTGWVQNQGILPGMVWQDRDVYLQGPIWAKIPHTYGNFHPSPLMGGFGMKHPPPQILIKNTPVPADPPTAFNKDKLNSFITQYSTGQVSVEIEWELQKENSKRWNPEIQYTSNYYKSNNVEFAVNTEGVYSEPRPIGTRYLTRNL

SEQ ID NO: 174 - protein, 736 aa, synthetic construct
MAADGYLPDWLEDNLSEGIREWWALKPGAPQPKANQQHQDNARGLVLPGYKYLGPGNGLDKGEPINAADAAALEHDKAYDQQLKAGDNPYLKYNHADAEFQERLKEDTSFGGNLGRAVFQAKKRLLEPLGLVEEAAKTAPGKKRPVEQSPQEPDSSAGIGKSGAQPAKKRLNFGQTGDTESVPDPQPIGEPPAAPSGVGSLTMASGGGAPVADNNEGADGVGSSSGNWHCDSQWLGDRVITTSTRTWALPTYNNHLYKQISNSTSGGSSNDNAYFGYSTPWGYFDFNRFHCHFSPRDWQRLINNNWGFRPKRLNFKLFNIQVKEVTDNNGVKTIANNLTSTVQVFADSDYQLPYVLGSAHEGCLPPFPADVFMIPQYGYLTLNDGSQAVGRSSFYCLEYFPSQMLRTGNNFQFSYEFENVPFHSSYAHSQSLDRLMNPLIDQYLYYLSKTINGSGQNQQTLKFSVAGPSNMAVQGRNYIPGPSYRQQRVSTTVTQNNNSEIAWPGASSWALNGRNSLMNPGPAMASHKEGEDRFFPLSGSLIFGKQGTGRDNVDADKVMITNEEEIKTTNPVATESYGQVATNHQSAQAQAQTGWVQNQGILPGMVWQDRDVYLQGPIWAKIPHTYGNFHPSPLMGGFGMKHPPPQILIKNTPVPADPPTAFNKDKLNSFITQYSTGQVSVEIEWELQKENSKRWNPEIQYTSNYYKSNNVEFAVNTEGVYSEPRPIGTRYLTRNL

SEQ ID NO: 175 - protein, 736 aa, synthetic construct
MAADGYLPDWLEDNLSEGIREWWALKPGAPQPKANQQHQDNARGLVLPGYKYLGPGNGLDKGEPINAADAAALEHDKAYDQQLKAGDNPYLKYNHADAEFQERLKEDTSFGGNLGRAVFQAKKRLLEPLGLVEEAAKTAPGKKRPVEQSPQEPDSSAGIGKSGAQPAKKRLNFGQTGDTESVPDPQPIGEPPAAPSGVGSLTMASGGGAPVADNNEGADGVGSSSGNWHCDSQWLGDRVITTSTRTWALPTYNNHLYKQISNSTSGGSSNDNAYFGYSTPWGYFDFNRFHCHFSPRDWQRLINNNWGFRPKRLNFKLFNIQVKEVTDNNGVKTIANNLTSTVQVFADSDYQLPYVLGSAHEGCLPPFPADVFMIPQYGYLTLNDGSQAVGRSSFYCLEYFPSQMLRTGNNFQFSYEFENVPFHSSYAHSQSLDRLMNPLIDQYLYYLSKTINGSGQNQQTLKFSVAGPSNMAVQGRNYIPGPSYRQQRVSTTVTQNNNSEFAWPRASSWALNGRNSLMNPGPAMASHKEGEDRFFPLSGSLIFGKQGTGRDNVDADKVMITNEEEIKTTNPVATESYGQVATNHQSAQAQAQTGWVQNQGILPGMVWQDRDVYLQGPIWAKIPHTYGNFHPSPLMGGFGMKHPPPQILIKNTPVPADPPTAFNKDKLNSFITQYSTGQVSVEIEWELQKENSKRWNPEIQYTSNYYKSNNVEFAVNTEGVYSEPRPIGTRYLTRNL

SEQ ID NO: 176 - protein, 736 aa, synthetic construct
MAADGYLPDWLEDNLSEGIREWWALKPGAPQPKANQQHQDNARGLVLPGYKYLGPGNGLDKGEPINAADAAALEHDKAYDQQLKAGDNPYLKYNHADAEFQERLKEDTSFGGNLGRAVFQAKKRLLEPLGLVEEAAKTAPGKKRPVEQSPQEPDSSAGIGKSGAQPAKKRLNFGQTGDTESVPDPQPIGEPPAAPSGVGSLTMASGGGAPVADNNEGADGVGSSSGNWHCDSQWLGDRVITTSTRTWALPTYNNHLYKQISNSTSGGSSNDNAYFGYSTPWGYFDFNRFHCHFSPRDWQRLINNNWGFRPKRLNFKLFNIQVKEVTDNNGVKTIANNLTSTVQVFADSDYQLPYVLGSAHEGCLPPFPADVFMIPQYGYLTLNDGSQAVGRSSFYCLEYFPSQMLRTGNNFQFSYEFENVPFHSSYAHSQSLDRLMNPLIDQYLYYLSKTINGSGQNQQTLKFSVAGPSNMAVQGRNYIPGPSYRQQRVSTTVTQNNNSEFAWPGASSWALNGRNSLMNPGPAMASHKEGEDRFFPLSGSLIFGKQGTGRDNVDADKVMITNEEEIKTTNPVATESYGQVATNHQSAQAQAQTGWVQNQGILPGMVWQDRDVYLQGPIWAKIPHTYGNFHPSPLMGGFGMKHPPPQILIKNTPVPADPPTAFNKDKLNSFITQYSTGQVSVEIEWELQKENSKRWNPEIQYTSNYCKSNNVEFAVNTEGVYSEPRPIGTRYLTRNL

SEQ ID NO: 177 - protein, 736 aa, synthetic construct
MAADGYLPDWLEDNLSEGIREWWALKPGAPQPKANQQHQDNARGLVLPGYKYLGPGNGLDKGEPINAADAAALEHDKAYDQQLKAGDNPYLKYNHADAEFQERLKEDTSFGGNLGRAVFQAKKRLLEPLGLVEEAAKTAPGKKRPVEQSPQEPDSSAGIGKSGAQPAKKRLNFGQTGDTESVPDPQPIGEPPAAPSGVGSLTMASGGGAPVADNNEGADGVGSSSGNWHCDSQWLGDRVITTSTRTWALPTYNNHLYKQISNSTSGGSSNDNAYFGYSTPWGYFDFNRFHCHFSPRDWQRLINNNWGFRPKRLNFKLFNIQVKEVTDNNGVKTIANNLTSTVQVFADSDYQLPYVLGSAHEGCLPPFPADVFMIPQYGYLTLNDGSQAVGRSSFYCLEYFPSQMLRTGNNFQFSYEFENVPFHSSYAHSQSLDRLMNPLIDQYLYYLSKTINGSGQNQQTLKFSVAGPSNMAVQGRNYIPGPSYRQQRVSTTVTQNNNSEIAWPRASSWALNGRNSLMNPGPAMASHKEGEDRFFPLSGSLIFGKQGTGRDNVDADKVMITNEEEIKTTNPVATESYGQVATNHQSAQAQAQTGWVQNQGILPGMVWQDRDVYLQGPIWAKIPHTYGNFHPSPLMGGFGMKHPPPQILIKNTPVPADPPTAFNKDKLNSFITQYSTGQVSVEIEWELQKENSKRWNPEIQYTSNYYKSNNVEFAVNTEGVYSEPRPIGTRYLTRNL

SEQ ID NO: 178 - protein, 736 aa, synthetic construct
MAADGYLPDWLEDNLSEGIREWWALKPGAPQPKANQQHQDNARGLVLPGYKYLGPGNGLDKGEPINAADAAALEHDKAYDQQLKAGDNPYLKYNHADAEFQERLKEDTSFGGNLGRAVFQAKKRLLEPLGLVEEAAKTAPGKKRPVEQSPQEPDSSAGIGKSGAQPAKKRLNFGQTGDTESVPDPQPIGEPPAAPSGVGSLTMASGGGAPVADNNEGADGVGSSSGNWHCDSQWLGDRVITTSTRTWALPTYNNHLYKQISNSTSGGSSNDNAYFGYSTPWGYFDFNRFHCHFSPRDWQRLINNNWGFRPKRLNFKLFNIQVKEVTDNNGVKTIANNLTSTVQVFADSDYQLPYVLGSAHEGCLPPFPADVFMIPQYGYLTLNDGSQAVGRSSFYCLEYFPSQMLRTGNNFQFSYEFENVPFHSSYAHSQSLDRLMNPLIDQYLYYLSKTINGSGQNQQTLKFSVAGPSNMAVQGRNYIPGPSYRQQRVSTTVTQNNNSEIAWPGASSWALNGRNSLMNPGPAMASHKEGEDRFFPLSGSLIFGKQGTGRDNVDADKVMITNEEEIKTTNPVATESYGQVATNHQSAQAQAQTGWVQNQGILPGMVWQDRDVYLQGPIWAKIPHTYGNFHPSPLMGGFGMKHPPPQILIKNTPVPADPPTAFNKDKLNSFITQYSTGQVSVEIEWELQKENSKRWNPEIQYTSNYCKSNNVEFAVNTEGVYSEPRPIGTRYLTRNL

SEQ ID NO: 179 - protein, 736 aa, synthetic construct
MAADGYLPDWLEDNLSEGIREWWALKPGAPQPKANQQHQDNARGLVLPGYKYLGPGNGLDKGEPINAADAAALEHDKAYDQQLKAGDNPYLKYNHADAEFQERLKEDTSFGGNLGRAVFQAKKRLLEPLGLVEEAAKTAPGKKRPVEQSPQEPDSSAGIGKSGAQPAKKRLNFGQTGDTESVPDPQPIGEPPAAPSGVGSLTMASGGGAPVADNNEGADGVGSSSGNWHCDSQWLGDRVITTSTRTWALPTYNNHLYKQISNSTSGGSSNDNAYFGYSTPWGYFDFNRFHCHFSPRDWQRLINNNWGFRPKRLNFKLFNIQVKEVTDNNGVKTIANNLTSTVQVFADSDYQLPYVLGSAHEGCLPPFPADVFMIPQYGYLTLNDGSQAVGRSSFYCLEYFPSQMLRTGNNFQFSYEFENVPFHSSYAHSQSLDRLMNPLIDQYLYYLSKTINGSGQNQQTLKFSVAGPSNMAVQGRNYIPGPSYRQQRVSTTVTQNNNSEFAWPRASSWALNGRNSLMNPGPAMASHKEGEDRFFPLSGSLIFGKQGTGRDNVDADKVMITNEEEIKTTNPVATESYGQVATNHQSAQAQAQTGWVQNQGILPGMVWQDRDVYLQGPIWAKIPHTYGNFHPSPLMGGFGMKHPPPQILIKNTPVPADPPTAFNKDKLNSFITQYSTGQVSVEIEWELQKENSKRWNPEIQYTSNYCKSNNVEFAVNTEGVYSEPRPIGTRYLTRNL

SEQ ID NO: 180 - protein, 736 aa, synthetic construct
MAADGYLPDWLEDNLSEGIREWWALKPGAPQPKANQQHQDNARGLVLPGYKYLGPGNGLDKGEPINAADAAALEHDKAYDQQLKAGDNPYLKYNHADAEFQERLKEDTSFGGNLGRAVFQAKKRLLEPLGLVEEAAKTAPGKKRPVEQSPQEPDSSAGIGKSGAQPAKKRLNFGQTGDTESVPDPQPIGEPPAAPSGVGSLTMASGGGAPVADNNEGADGVGSSSGNWHCDSQWLGDRVITTSTRTWALPTYNNHLYKQISNSTSGGSSNDNAYFGYSTPWGYFDFNRFHCHFSPRDWQRLINNNWGFRPKRLNFKLFNIQVKEVTDNNGVKTIANNLTSTVQVFADSDYQLPYVLGSAHEGCLPPFPADVFMIPQYGYLTLNDGSQAVGRSSFYCLEYFPSQMLRTGNNFQFSYEFENVPFHSSYAHSQSLDRLMNPLIDQYLYYLSKTINGSGQNQQTLKFSVAGPSNMAVQGRNYIPGPSYRQQRVSTTVTQNNNSEIAWPRASSWALNGRNSLMNPGPAMASHKEGEDRFFPLSGSLIFGKQGTGRDNVDADKVMITNEEEIKTTNPVATESYGQVATNHQSAQAQAQTGWVQNQGILPGMVWQDRDVYLQGPIWAKIPHTYGNFHPSPLMGGFGMKHPPPQILIKNTPVPADPPTAFNKDKLNSFITQYSTGQVSVEIEWELQKENSKRWNPEIQYTSNYCKSNNVEFAVNTEGVYSEPRPIGTRYLTRNL

SEQ ID NO: 181 - protein, 736 aa, synthetic construct
MAADGYLPDWLEDNLSEGIREWWALKPGAPQPKANQQHQDNARGLVLPGYKYLGPGNGLDKGEPVNAADAAALEHDKAYDQQLKAGDNPYLKYNHADAEFQERLKEDTSFGGNLGRAVFQAKKRLLEPLGLVEEAAKTAPGKKRPVEQSPQEPDSSAGIGKSGAQPAKKRLNFGQTGDTESVPDPQPIGEPPAAPSGVGSLTMASGGGAPVADNNEGADGVGSSSGNWHCDSQWLGDRVITTSTRTWALPTYNNHLYKQISNSTSGGSSNDNAYFGYSTPWGYFDFNRFHCHFSPHDWQRLINNNWGFRPKRLNFKLFNIQVKEVTDNNGVKTIANNLTSTVQVFTDSDYQLPYVLGSAHEGCLPPFPADVFMIPQYGYLTLNDGSQAVGRSSFYCLEYFPSQMLRTGNNFQFSYEFENVPFHSSYAHSQSLDRLMNPLIDQYLYYLSKTINGSGQNQQTLKFNVAGPSNMAVQGRNYIPGPSYRQQRVSTTVTQNNNSEIAWPRASSWALNGRNSLMNPGPAMASHKEGEDRFFPLSGSLIFGKQGTGRDNVDADKVMITNEEEIKTTNPVATESYGQVATNHQSAQAQAQTGWVQNQGILPGMVWQDRDVYLQGPIWAKIPHTDGNFHPSPLMGGFGMKHPPPQILIKNTPVPADPPTAFNKDKLNSFITQYSTGQVSMEIEWELQKENSKRWNPEIQYTSNYYKSNNVEFAVNTEGVYSEPRPIGTRYLTRNL

SEQ ID NO: 182 - protein, 736 aa, synthetic construct
MAADGYLPDWLEDNLSEGIREWWALKPGAPQPKANQQHQDNARGLVLPGYKYLGPGNGLDKGEPVNAADAAALEHDKAYDQQLKAGDNPYLKYNHADAEFQERLKEDTSFGGNLGRAVFQAKKRLLEPLGLVEEAAKTAPGKKRPVEQSPQEPDSSAGIGKSGAQPAKKRLNFGQTGDTESVPDPQPIGEPPAAPSGVGSLTMASGGGAPVADNNEGADGVGSSSGNWHCDSQWLGDRVITTSTRTWALPTYNNHLYKQISNSTSGGSSNDNAYFGYSTPWGYFDFNRFHCHFSPHDWQRLINNNWGFRPKRLNFKLFNIQVKEVTDNNGVKTIANNLTSTVQVFTDSDYQLPYVLGSAHEGCLPPFPADVFMIPQYGYLTLNDGSQAVGRSSFYCLEYFPSQMLRTGNNFQFSYEFENVPFHSSYAHSQSLDRLMNPLIDQYLYYLSKTINGSGQNQQTLKFNVAGPSNMAVQGRNYIPGPSYRQQRVSTTVTQNNNSEFAWPRASSWALNGRNSLMNPGPAMASHKEGEDRFFPLSGSLIFGKQGTGRDNVDADKVMITNEEEIKTTNPVATESYGQVATNHQSAQAQAQTGWVQNQGILPGMVWQDRDVYLQGPIWAKIPHTDGNFHPSPLMGGFGMKHPPPQILIKNTPVPADPPTAFNKDKLNSFITQYSTGQVSMEIEWELQKENSKRWNPEIQYTSNYCKSNNVEFAVNTEGVYSEPRPIGTRYLTRNL

SEQ ID NO: 183 - protein, 736 aa, synthetic construct
MAADGYLPDWLEDNLSEGIREWWALKPGAPQPKANQQHQDNARGLVLPGYKYLGPGNGLDKGEPVNAADAAALEHDKAYDQQLKAGDNPYLKYNHADAEFQERLKEDTSFGGNLGRAVFQAKKRLLEPLGLVEEAAKTAPGKKRPVEQSPQEPDSSAGIGKSGAQPAKKRLNFGQTGDTESVPDPQPIGEPPAAPSGVGSLTMASGGGAPVADNNEGADGVGSSSGNWHCDSQWLGDRVITTSTRTWALPTYNNHLYKQISNSTSGGSSNDNAYFGYSTPWGYFDFNRFHCHFSPHDWQRLINNNWGFRPKRLNFKLFNIQVKEVTDNNGVKTIANNLTSTVQVFTDSDYQLPYVLGSAHEGCLPPFPADVFMIPQYGYLTLNDGSQAVGRSSFYCLEYFPSQMLRTGNNFQFSYEFENVPFHSSYAHSQSLDRLMNPLIDQYLYYLSKTINGSGQNQQTLKFNVAGPSNMAVQGRNYIPGPSYRQQRVSTTVTQNNNSEIAWPRASSWALNGRNSLMNPGPAMASHKEGEDRFFPLSGSLIFGKQGTGRDNVDADKVMITNEEEIKTTNPVATESYGQVATNHQSAQAQAQTGWVQNQGILPGMVWQDRDVYLQGPIWAKIPHTDGNFHPSPLMGGFGMKHPPPQILIKNTPVPADPPTAFNKDKLNSFITQYSTGQVSMEIEWELQKENSKRWNPEIQYTSNYCKSNNVEFAVNTEGVYSEPRPIGTRYLTRNL

SEQ ID NO: 184 - protein, 736 aa, synthetic construct
MAADGYLPDWLEDNLSEGIREWWALKPGAPQPKANQQHQDNARGLVLPGYKYLGPGNGLDKGEPVNAADAAALEHDKAYDQQLKAGDNPYLKYNHADAEFQERLKEDTSFGGNLGRAVFQAKKRLLEPLGLVEEAAKTAPGKKRPVEQSPQEPDSSAGIGKSGAQPAKKRLNFGQTGDTESVPDPQPIGEPPAAPSGVGSLTMASGGGAPVADNNEGADGVGSSSGNWHCDSQWLGDRVITTSTRTWALPTYNNHLYKQISNSTSGGSSNDNAYFGYSTPWGYFDFNRFHCHFSPHDWQRLINNNWGFRPKRLNFKLFNIQVKEVTDNNGVKTIANNLTSTVQVFADSDYQLPYVLGSAHEGCLPPFPADVFMIPQYGYLTLNDGSQAVGRSSFYCLEYFPSQMLRTGNNFQFSYEFENVPFHSSYAHSQSLDRLMNPLIDQYLYYLSKTINGSGQNQQTLKFNVAGPSNMAVQGRNYIPGPSYRQQRVSTTVTQNNNSEFAWPRASSWALNGRNSLMNPGPAMASHKEGEDRFFPLSGSLIFGKQGTGRDNVDADKVMITNEEEIKTTNPVATESYGQVATNHQSAQAQAQTGWVQNQGILPGMVWQDRDVYLQGPIWAKIPHTDGNFHPSPLMGGFGMKHPPPQILIKNTPVPADPPTAFNKDKLNSFITQYSTGQVSMEIEWELQKENSKRWNPEIQYTSNYYKSNNVEFAVNTEGVYSEPRPIGTRYLTRNL

SEQ ID NO: 185 - protein, 736 aa, synthetic construct
MAADGYLPDWLEDNLSEGIREWWALKPGAPQPKANQQHQDNARGLVLPGYKYLGPGNGLDKGEPVNAADAAALEHDKAYDQQLKAGDNPYLKYNHADAEFQERLKEDTSFGGNLGRAVFQAKKRLLEPLGLVEEAAKTAPGKKRPVEQSPQEPDSSAGIGKSGAQPAKKRLNFGQTGDTESVPDPQPIGEPPAAPSGVGSLTMASGGGAPVADNNEGADGVGSSSGNWHCDSQWLGDRVITTSTRTWALPTYNNHLYKQISNSTSGGSSNDNAYFGYSTPWGYFDFNRFHCHFSPHDWQRLINNNWGFRPKRLNFKLFNIQVKEVTDNNGVKTIANNLTSTVQVFADSDYQLPYVLGSAHEGCLPPFPADVFMIPQYGYLTLNDGSQAVGRSSFYCLEYFPSQMLRTGNNFQFSYEFENVPFHSSYAHSQSLDRLMNPLIDQYLYYLSKTINGSGQNQQTLKFNVAGPSNMAVQGRNYIPGPSYRQQRVSTTVTQNNNSEIAWPRASSWALNGRNSLMNPGPAMASHKEGEDRFFPLSGSLIFGKQGTGRDNVDADKVMITNEEEIKTTNPVATESYGQVATNHQSAQAQAQTGWVQNQGILPGMVWQDRDVYLQGPIWAKIPHTDGNFHPSPLMGGFGMKHPPPQILIKNTPVPADPPTAFNKDKLNSFITQYSTGQVSMEIEWELQKENSKRWNPEIQYTSNYYKSNNVEFAVNTEGVYSEPRPIGTRYLTRNL

SEQ ID NO: 186 - protein, 736 aa, synthetic construct
MAADGYLPDWLEDNLSEGIREWWALKPGAPQPKANQQHQDNARGLVLPGYKYLGPGNGLDKGEPVNAADAAALEHDKAYDQQLKAGDNPYLKYNHADAEFQERLKEDTSFGGNLGRAVFQAKKRLLEPLGLVEEAAKTAPGKKRPVEQSPQEPDSSAGIGKSGAQPAKKRLNFGQTGDTESVPDPQPIGEPPAAPSGVGSLTMASGGGAPVADNNEGADGVGSSSGNWHCDSQWLGDRVITTSTRTWALPTYNNHLYKQISNSTSGGSSNDNAYFGYSTPWGYFDFNRFHCHFSPHDWQRLINNNWGFRPKRLNFKLFNIQVKEVTDNNGVKTIANNLTSTVQVFADSDYQLPYVLGSAHEGCLPPFPADVFMIPQYGYLTLNDGSQAVGRSSFYCLEYFPSQMLRTGNNFQFSYEFENVPFHSSYAHSQSLDRLMNPLIDQYLYYLSKTINGSGQNQQTLKFNVAGPSNMAVQGRNYIPGPSYRQQRVSTTVTQNNNSEFAWPRASSWALNGRNSLMNPGPAMASHKEGEDRFFPLSGSLIFGKQGTGRDNVDADKVMITNEEEIKTTNPVATESYGQVATNHQSAQAQAQTGWVQNQGILPGMVWQDRDVYLQGPIWAKIPHTDGNFHPSPLMGGFGMKHPPPQILIKNTPVPADPPTAFNKDKLNSFITQYSTGQVSMEIEWELQKENSKRWNPEIQYTSNYCKSNNVEFAVNTEGVYSEPRPIGTRYLTRNL

SEQ ID NO: 187 - protein, 736 aa, synthetic construct
MAADGYLPDWLEDNLSEGIREWWALKPGAPQPKANQQHQDNARGLVLPGYKYLGPGNGLDKGEPVNAADAAALEHDKAYDQQLKAGDNPYLKYNHADAEFQERLKEDTSFGGNLGRAVFQAKKRLLEPLGLVEEAAKTAPGKKRPVEQSPQEPDSSAGIGKSGAQPAKKRLNFGQTGDTESVPDPQPIGEPPAAPSGVGSLTMASGGGAPVADNNEGADGVGSSSGNWHCDSQWLGDRVITTSTRTWALPTYNNHLYKQISNSTSGGSSNDNAYFGYSTPWGYFDFNRFHCHFSPHDWQRLINNNWGFRPKRLNFKLFNIQVKEVTDNNGVKTIANNLTSTVQVFADSDYQLPYVLGSAHEGCLPPFPADVFMIPQYGYLTLNDGSQAVGRSSFYCLEYFPSQMLRTGNNFQFSYEFENVPFHSSYAHSQSLDRLMNPLIDQYLYYLSKTINGSGQNQQTLKFNVAGPSNMAVQGRNYIPGPSYRQQRVSTTVTQNNNSEIAWPRASSWALNGRNSLMNPGPAMASHKEGEDRFFPLSGSLIFGKQGTGRDNVDADKVMITNEEEIKTTNPVATESYGQVATNHQSAQAQAQTGWVQNQGILPGMVWQDRDVYLQGPIWAKIPHTDGNFHPSPLMGGFGMKHPPPQILIKNTPVPADPPTAFNKDKLNSFITQYSTGQVSMEIEWELQKENSKRWNPEIQYTSNYCKSNNVEFAVNTEGVYSEPRPIGTRYLTRNL

SEQ ID NO: 188 - protein, 736 aa, synthetic construct
MAADGYLPDWLEDNLSEGIREWWALKPGAPQPKANQQHQDNARGLVLPGYKYLGPGNGLDKGEPVNAADAAALEHDKAYDQQLKAGDNPYLKYNHADAEFQERLKEDTSFGGNLGRAVFQAKKRLLEPLGLVEEAAKTAPGKKRPVEQSPQEPDSSAGIGKSGAQPAKKRLNFGQTGDTESVPDPQPIGEPPAAPSGVGSLTMASGGGAPVADNNEGADGVGSSSGNWHCDSQWLGDRVITTSTRTWALPTYNNHLYKQISNSTSGGSSNDNAYFGYSTPWGYFDFNRFHCHFSPRDWQRLINNNWGFRPKRLNFKLFNIQVKEVTDNNGVKTIANNLTSTVQVFTDSDYQLPYVLGSAHEGCLPPFPADVFMIPQYGYLTLNDGSQAVGRSSFYCLEYFPSQMLRTGNNFQFSYEFENVPFHSSYAHSQSLDRLMNPLIDQYLYYLSKTINGSGQNQQTLKFSVAGPSNMAVQGRNYIPGPSYRQQRVSTTVTQNNNSEIAWPRASSWALNGRNSLMNPGPAMASHKEGEDRFFPLSGSLIFGKQGTGRDNVDADKVMITNEEEIKTTNPVATESYGQVATNHQSAQAQAQTGWVQNQGILPGMVWQDRDVYLQGPIWAKIPHTDGNFHPSPLMGGFGMKHPPPQILIKNTPVPADPPTAFNKDKLNSFITQYSTGQVSVEIEWERQKENSKRWNPEIQYTSNYYKSNNVEFAVNTEGVYSEPRPIGTRYLTRNL

SEQ ID NO: 189 - protein, 736 aa, synthetic construct
MAADGYLPDWLEDNLSEGIREWWALKPGAPQPKANQQHQDNARGLVLPGYKYLGPGNGLDKGEPVNAADAAALEHDKAYDQQLKAGDNPYLKYNHADAEFQERLKEDTSFGGNLGRAVFQAKKRLLEPLGLVEEAAKTAPGKKRPVEQSPQEPDSSAGIGKSGAQPAKKRLNFGQTGDTESVPDPQPIGEPPAAPSGVGSLTMASGGGAPVADNNEGADGVGSSSGNWHCDSQWLGDRVITTSTRTWALPTYNNHLYKQISNSTSGGSSNDNAYFGYSTPWGYFDFNRFHCHFSPRDWQRLINNNWGFRPKRLNFKLFNIQVKEVTDNNGVKTIANNLTSTVQVFTDSDYQLPYVLGSAHEGCLPPFPADVFMIPQYGYLTLNDGSQAVGRSSFYCLEYFPSQMLRTGNNFQFSYEFENVPFHSSYAHSQSLDRLMNPLIDQYLYYLSKTINGSGQNQQTLKFSVAGPSNMAVQGRNYIPGPSYRQQRVSTTVTQNNNSEFAWPRASSWALNGRNSLMNPGPAMASHKEGEDRFFPLSGSLIFGKQGTGRDNVDADKVMITNEEEIKTTNPVATESYGQVATNHQSAQAQAQTGWVQNQGILPGMVWQDRDVYLQGPIWAKIPHTDGNFHPSPLMGGFGMKHPPPQILIKNTPVPADPPTAFNKDKLNSFITQYSTGQVSVEIEWERQKENSKRWNPEIQYTSNYCKSNNVEFAVNTEGVYSEPRPIGTRYLTRNL

SEQ ID NO: 190 - protein, 736 aa, synthetic construct
MAADGYLPDWLEDNLSEGIREWWALKPGAPQPKANQQHQDNARGLVLPGYKYLGPGNGLDKGEPVNAADAAALEHDKAYDQQLKAGDNPYLKYNHADAEFQERLKEDTSFGGNLGRAVFQAKKRLLEPLGLVEEAAKTAPGKKRPVEQSPQEPDSSAGIGKSGAQPAKKRLNFGQTGDTESVPDPQPIGEPPAAPSGVGSLTMASGGGAPVADNNEGADGVGSSSGNWHCDSQWLGDRVITTSTRTWALPTYNNHLYKQISNSTSGGSSNDNAYFGYSTPWGYFDFNRFHCHFSPRDWQRLINNNWGFRPKRLNFKLFNIQVKEVTDNNGVKTIANNLTSTVQVFTDSDYQLPYVLGSAHEGCLPPFPADVFMIPQYGYLTLNDGSQAVGRSSFYCLEYFPSQMLRTGNNFQFSYEFENVPFHSSYAHSQSLDRLMNPLIDQYLYYLSKTINGSGQNQQTLKFSVAGPSNMAVQGRNYIPGPSYRQQRVSTTVTQNNNSEIAWPRASSWALNGRNSLMNPGPAMASHKEGEDRFFPLSGSLIFGKQGTGRDNVDADKVMITNEEEIKTTNPVATESYGQVATNHQSAQAQAQTGWVQNQGILPGMVWQDRDVYLQGPIWAKIPHTDGNFHPSPLMGGFGMKHPPPQILIKNTPVPADPPTAFNKDKLNSFITQYSTGQVSVEIEWERQKENSKRWNPEIQYTSNYCKSNNVEFAVNTEGVYSEPRPIGTRYLTRNL

SEQ ID NO: 191 - protein, 736 aa, synthetic construct
MAADGYLPDWLEDNLSEGIREWWALKPGAPQPKANQQHQDNARGLVLPGYKYLGPGNGLDKGEPVNAADAAALEHDKAYDQQLKAGDNPYLKYNHADAEFQERLKEDTSFGGNLGRAVFQAKKRLLEPLGLVEEAAKTAPGKKRPVEQSPQEPDSSAGIGKSGAQPAKKRLNFGQTGDTESVPDPQPIGEPPAAPSGVGSLTMASGGGAPVADNNEGADGVGSSSGNWHCDSQWLGDRVITTSTRTWALPTYNNHLYKQISNSTSGGSSNDNAYFGYSTPWGYFDFNRFHCHFSPRDWQRLINNNWGFRPKRLNFKLFNIQVKEVTDNNGVKTIANNLTSTVQVFADSDYQLPYVLGSAHEGCLPPFPADVFMIPQYGYLTLNDGSQAVGRSSFYCLEYFPSQMLRTGNNFQFSYEFENVPFHSSYAHSQSLDRLMNPLIDQYLYYLSKTINGSGQNQQTLKFSVAGPSNMAVQGRNYIPGPSYRQQRVSTTVTQNNNSEFAWPRASSWALNGRNSLMNPGPAMASHKEGEDRFFPLSGSLIFGKQGTGRDNVDADKVMITNEEEIKTTNPVATESYGQVATNHQSAQAQAQTGWVQNQGILPGMVWQDRDVYLQGPIWAKIPHTDGNFHPSPLMGGFGMKHPPPQILIKNTPVPADPPTAFNKDKLNSFITQYSTGQVSVEIEWERQKENSKRWNPEIQYTSNYYKSNNVEFAVNTEGVYSEPRPIGTRYLTRNL

SEQ ID NO: 192 - protein, 736 aa, synthetic construct
MAADGYLPDWLEDNLSEGIREWWALKPGAPQPKANQQHQDNARGLVLPGYKYLGPGNGLDKGEPVNAADAAALEHDKAYDQQLKAGDNPYLKYNHADAEFQERLKEDTSFGGNLGRAVFQAKKRLLEPLGLVEEAAKTAPGKKRPVEQSPQEPDSSAGIGKSGAQPAKKRLNFGQTGDTESVPDPQPIGEPPAAPSGVGSLTMASGGGAPVADNNEGADGVGSSSGNWHCDSQWLGDRVITTSTRTWALPTYNNHLYKQISNSTSGGSSNDNAYFGYSTPWGYFDFNRFHCHFSPRDWQRLINNNWGFRPKRLNFKLFNIQVKEVTDNNGVKTIANNLTSTVQVFADSDYQLPYVLGSAHEGCLPPFPADVFMIPQYGYLTLNDGSQAVGRSSFYCLEYFPSQMLRTGNNFQFSYEFENVPFHSSYAHSQSLDRLMNPLIDQYLYYLSKTINGSGQNQQTLKFSVAGPSNMAVQGRNYIPGPSYRQQRVSTTVTQNNNSEIAWPRASSWALNGRNSLMNPGPAMASHKEGEDRFFPLSGSLIFGKQGTGRDNVDADKVMITNEEEIKTTNPVATESYGQVATNHQSAQAQAQTGWVQNQGILPGMVWQDRDVYLQGPIWAKIPHTDGNFHPSPLMGGFGMKHPPPQILIKNTPVPADPPTAFNKDKLNSFITQYSTGQVSVEIEWERQKENSKRWNPEIQYTSNYYKSNNVEFAVNTEGVYSEPRPIGTRYLTRNL

SEQ ID NO: 193 - protein, 736 aa, synthetic construct
MAADGYLPDWLEDNLSEGIREWWALKPGAPQPKANQQHQDNARGLVLPGYKYLGPGNGLDKGEPVNAADAAALEHDKAYDQQLKAGDNPYLKYNHADAEFQERLKEDTSFGGNLGRAVFQAKKRLLEPLGLVEEAAKTAPGKKRPVEQSPQEPDSSAGIGKSGAQPAKKRLNFGQTGDTESVPDPQPIGEPPAAPSGVGSLTMASGGGAPVADNNEGADGVGSSSGNWHCDSQWLGDRVITTSTRTWALPTYNNHLYKQISNSTSGGSSNDNAYFGYSTPWGYFDFNRFHCHFSPRDWQRLINNNWGFRPKRLNFKLFNIQVKEVTDNNGVKTIANNLTSTVQVFADSDYQLPYVLGSAHEGCLPPFPADVFMIPQYGYLTLNDGSQAVGRSSFYCLEYFPSQMLRTGNNFQFSYEFENVPFHSSYAHSQSLDRLMNPLIDQYLYYLSKTINGSGQNQQTLKFSVAGPSNMAVQGRNYIPGPSYRQQRVSTTVTQNNNSEFAWPRASSWALNGRNSLMNPGPAMASHKEGEDRFFPLSGSLIFGKQGTGRDNVDADKVMITNEEEIKTTNPVATESYGQVATNHQSAQAQAQTGWVQNQGILPGMVWQDRDVYLQGPIWAKIPHTDGNFHPSPLMGGFGMKHPPPQILIKNTPVPADPPTAFNKDKLNSFITQYSTGQVSVEIEWERQKENSKRWNPEIQYTSNYCKSNNVEFAVNTEGVYSEPRPIGTRYLTRNL

SEQ ID NO: 194 - protein, 736 aa, synthetic construct
MAADGYLPDWLEDNLSEGIREWWALKPGAPQPKANQQHQDNARGLVLPGYKYLGPGNGLDKGEPVNAADAAALEHDKAYDQQLKAGDNPYLKYNHADAEFQERLKEDTSFGGNLGRAVFQAKKRLLEPLGLVEEAAKTAPGKKRPVEQSPQEPDSSAGIGKSGAQPAKKRLNFGQTGDTESVPDPQPIGEPPAAPSGVGSLTMASGGGAPVADNNEGADGVGSSSGNWHCDSQWLGDRVITTSTRTWALPTYNNHLYKQISNSTSGGSSNDNAYFGYSTPWGYFDFNRFHCHFSPRDWQRLINNNWGFRPKRLNFKLFNIQVKEVTDNNGVKTIANNLTSTVQVFADSDYQLPYVLGSAHEGCLPPFPADVFMIPQYGYLTLNDGSQAVGRSSFYCLEYFPSQMLRTGNNFQFSYEFENVPFHSSYAHSQSLDRLMNPLIDQYLYYLSKTINGSGQNQQTLKFSVAGPSNMAVQGRNYIPGPSYRQQRVSTTVTQNNNSEIAWPRASSWALNGRNSLMNPGPAMASHKEGEDRFFPLSGSLIFGKQGTGRDNVDADKVMITNEEEIKTTNPVATESYGQVATNHQSAQAQAQTGWVQNQGILPGMVWQDRDVYLQGPIWAKIPHTDGNFHPSPLMGGFGMKHPPPQILIKNTPVPADPPTAFNKDKLNSFITQYSTGQVSVEIEWERQKENSKRWNPEIQYTSNYCKSNNVEFAVNTEGVYSEPRPIGTRYLTRNL

SEQ ID NO: 195 - protein, 736 aa, synthetic construct
MAADGYLPDWLEDNLSEGIREWWALKPGAPQPKANQQHQDNARGLVLPGYKYLGPGNGLDKGEPVNAADAAALEHDKAYDQQLKAGDNPYLKYNHADAEFQERLKEDTSFGGNLGRAVFQAKKRLLEPLGLVEEAAKTAPGKKRPVEQSPQEPDSSAGIGKSGAQPAKKRLNFGQTGDTESVPDPQPIGEPPAAPSGVGSLTMASGGGAPVADNNEGADGVGSSSGNWHCDSQWLGDRVITTSTRTWALPTYNNHLYKQISNSTSGGSSNDNAYFGYSTPWGYFDFNRFHCHFSPRDWQRLINNNWGFRPKRLNFKLFNIQVKEVTDNNGVKTIANNLTSTVQVFADSDYQLPYVLGSAHEGCLPPFPADVFMIPQYGYLTLNDGSQAVGRSSFYCLEYFPSQMLRTGNNFQFSYEFENVPFHSSYAHSQSLDRLMNPLIDQYLYYLSKTINGSGQNQQTLKFSVAGPSNMAVQGRNYIPGPSYRQQRVSTTVTQNNNSEIAWPRASSWALNGRNSLMNPGPAMASHKEGEDRFFPLSGSLIFGKQGTGRDNVDADKVMITNEEEIKTTNPVATESYGQVATNHQSAQAQAQTGWVQNQGILPGMVWQDRDVYLQGPIWAKIPHTDGNFHPSPLMGGFGMKHPPPQILIKNTPVPADPPTAFNKDKLNSFITQYSTGQVSVEIEWELQKENSKRWNPEIQYTSNYYKSNNVEFAVNTEGVYSEPRPIGTRYLTRNL

SEQ ID NO: 196 - protein, 736 aa, synthetic construct
MAADGYLPDWLEDNLSEGIREWWALKPGAPQPKANQQHQDNARGLVLPGYKYLGPGNGLDKGEPVNAADAAALEHDKAYDQQLKAGDNPYLKYNHADAEFQERLKEDTSFGGNLGRAVFQAKKRLLEPLGLVEEAAKTAPGKKRPVEQSPQEPDSSAGIGKSGAQPAKKRLNFGQTGDTESVPDPQPIGEPPAAPSGVGSLTMASGGGAPVADNNEGADGVGSSSGNWHCDSQWLGDRVITTSTRTWALPTYNNHLYKQISNSTSGGSSNDNAYFGYSTPWGYFDFNRFHCHFSPRDWQRLINNNWGFRPKRLNFKLFNIQVKEVTDNNGVKTIANNLTSTVQVFADSDYQLPYVLGSAHEGCLPPFPADVFMIPQYGYLTLNDGSQAVGRSSFYCLEYFPSQMLRTGNNFQFSYEFENVPFHSSYAHSQSLDRLMNPLIDQYLYYLSKTINGSGQNQQTLKFSVAGPSNMAVQGRNYIPGPSYRQQRVSTTVTQNNNSEFAWPRASSWALNGRNSLMNPGPAMASHKEGEDRFFPLSGSLIFGKQGTGRDNVDADKVMITNEEEIKTTNPVATESYGQVATNHQSAQAQAQTGWVQNQGILPGMVWQDRDVYLQGPIWAKIPHTDGNFHPSPLMGGFGMKHPPPQILIKNTPVPADPPTAFNKDKLNSFITQYSTGQVSVEIEWELQKENSKRWNPEIQYTSNYCKSNNVEFAVNTEGVYSEPRPIGTRYLTRNL

SEQ ID NO: 197 - protein, 736 aa, synthetic construct
MAADGYLPDWLEDNLSEGIREWWALKPGAPQPKANQQHQDNARGLVLPGYKYLGPGNGLDKGEPVNAADAAALEHDKAYDQQLKAGDNPYLKYNHADAEFQERLKEDTSFGGNLGRAVFQAKKRLLEPLGLVEEAAKTAPGKKRPVEQSPQEPDSSAGIGKSGAQPAKKRLNFGQTGDTESVPDPQPIGEPPAAPSGVGSLTMASGGGAPVADNNEGADGVGSSSGNWHCDSQWLGDRVITTSTRTWALPTYNNHLYKQISNSTSGGSSNDNAYFGYSTPWGYFDFNRFHCHFSPRDWQRLINNNWGFRPKRLNFKLFNIQVKEVTDNNGVKTIANNLTSTVQVFADSDYQLPYVLGSAHEGCLPPFPADVFMIPQYGYLTLNDGSQAVGRSSFYCLEYFPSQMLRTGNNFQFSYEFENVPFHSSYAHSQSLDRLMNPLIDQYLYYLSKTINGSGQNQQTLKFSVAGPSNMAVQGRNYIPGPSYRQQRVSTTVTQNNNSEIAWPRASSWALNGRNSLMNPGPAMASHKEGEDRFFPLSGSLIFGKQGTGRDNVDADKVMITNEEEIKTTNPVATESYGQVATNHQSAQAQAQTGWVQNQGILPGMVWQDRDVYLQGPIWAKIPHTDGNFHPSPLMGGFGMKHPPPQILIKNTPVPADPPTAFNKDKLNSFITQYSTGQVSVEIEWELQKENSKRWNPEIQYTSNYCKSNNVEFAVNTEGVYSEPRPIGTRYLTRNL

SEQ ID NO: 198 - protein, 736 aa, synthetic construct
MSRVVMSFVDHPPDWLKEAAGGLREFLDLEPGAPKPKPNQQKQDQRGLVLPGYKYLGPFNGLDKGQPVNKADEVAREHDLEYNKLLEAGDNPYLKYNHADQEFQEKLEGDTSFGGNLGRAVFQAKKRVLEPFGLAEEAPAKTAPGKKRPRPIEPPPSSENSVDEDLVERQAQRQRLGFQDGPGNSANQVQQQPAANMASAEVAAGSGGPMGDNAQGADGVGSSSGNWHCDSLWMGDRVMRFPWMGDRVITKSTRTWSLPTYNNHLYKQINSNSDVTDEKYFGYSTPWGYFDFNRFHCHFSPRDWQRLINNHWGMRPKRLNFKLFNIQVKEVTTNDGTTTIANNLTSTVQIFADSEYQLPYVLGNAHEGCLPPFPADVFMLPQYGYLTLNDGNQVIPQSSFYCLEYFPSQMLRTGNNFSFSYEFENVPFHSMFMHNQSLDRLMNPLMDQYLWYLTATNGVQLHFKKSKKGAFASQFRNWLPGPNQRRQQWSKGAGNNNAQTILWSYKNKYRIMNRDSVAAPGLAQAAADGFITADGQLIFSNAGQQSDEAAGAKPPTTLLITDESETRPTNPGANTKWGEVADNQQTSSTAPTMAIDNEAHIFPGMVWQDRDIYLQGPIWAKIPETDGHFHPSPLMGGFGLRNPPPQILIKNTPVPANPPETFNANKINSFITQYSTGQVTVEIEWELKKEHSKRWNPEVQYTSNFASADSLQFTVNGEGVYIEDRPIGTRYLSHNI

SEQ ID NO: 199 - protein, 736 aa, synthetic construct
MSRVVMSFVDHPPDWLKEAAGGLREFLDLEPGAPKPKPNQQKQDQRGLVLPGYKYLGPFNGLDKGQPVNKADEVAREHDLEYNKLLEAGDNPYLKYNHADQEFQEKLEGDTSFGGNLGRAVFQAKKRVLEPFGLAEEAPAKTAPGKKRPRPIEPPPSSENSVDEDLVERQAQRQRLGFQDGPGNSANQVQQQPAANMASAEVAAGSGGPMGDNAQGADGVGSSSGNWHCDSLWMGDRVMRFPWMGDRVITKSTRTWSLPTYNNHLYKQINSNSDVTDEKYFGYSTPWGYFDFNRFHCHFSPRDWQRLINNHWGMRPKRLNFKLFNIQVKEVTTNDGTTTIANNLTSTVQIFADSEYQLPYVLGNAHEGCLPPFPADVFMLPQYGYLTLNDGNQVIPQSSFYCLEYFPSQMLRTGNNFSFSYEFENVPFHSMFMHNQSLDRLMNPLMDQYLWYLTATNGVQLHFKKSKKGAFASQFRNWLPGPNQRRQQWSKGAGNNNAQTNLWSRKNKYRIMNRDSVAAPGLAQAAADGFITADGQLIFSNAGQQSDEAAGAKPPTTLLITDESETRPTNPGANTKWGEVADNQQTSSTAPTMAIDNEAHIFPGMVWQDRDIYLQGPIWAKIPETDGHFHPSPLMGGFGLRNPPPQILIKNTPVPANPPETFNANKINSFITQYSTGQVTVEIEWELKKEHSKRWNPEVQYTSNFASADSLQFTVNGEGVYIEDRPIGTRYLSHNI

SEQ ID NO: 200 - protein, 736 aa, synthetic construct
MSRVVMSFVDHPPDWLKEAAGGLREFLDLEPGAPKPKPNQQKQDQRGLVLPGYKYLGPFNGLDKGQPVNKADEVAREHDLEYNKLLEAGDNPYLKYNHADQEFQEKLEGDTSFGGNLGRAVFQAKKRVLEPFGLAEEAPAKTAPGKKRPRPIEPPPSSENSVDEDLVERQAQRQRLGFQDGPGNSANQVQQQPAANMASAEVAAGSGGPMGDNAQGADGVGSSSGNWHCDSLWMGDRVMRFPWMGDRVITKSTRTWSLPTYNNHLYKQINSNSDVTDEKYFGYSTPWGYFDFNRFHCHFSPRDWQRLINNHWGMRPKRLNFKLFNIQVKEVTTNDGTTTIANNLTSTVQIFADSEYQLPYVLGNAHEGCLPPFPADVFMLPQYGYLTLNDGNQVIPQSSFYCLEYFPSQMLRTGNNFSFSYEFENVPFHSMFMHNQSLDRLMNPLMDQYLWYLTATNGVQLHFKKSKKGAFASQFRNWLPGPNQRRQQWSKGAGNNNAQTNLWSYKNKYRIMNRDSVAAPGLAQAAADGFITADGQLIFSNAGQQSDEAAGAKPPTTLLITDESETRPTNPGANTKWGEVADNQQTSSTAPTMAIDNEAHIFPGMVWQDRDIYLQGPIWAKIPETDGHFHPSPLMGGFGLRNPPPQILIKNTPVPANPPETFNANKINSFITQYSTGQVTVEIEWELKKEHSKRWNPEVQYTSNFCSADSLQFTVNGEGVYIEDRPIGTRYLSHNI

SEQ ID NO: 201 - protein, 736 aa, synthetic construct
MSRVVMSFVDHPPDWLKEAAGGLREFLDLEPGAPKPKPNQQKQDQRGLVLPGYKYLGPFNGLDKGQPVNKADEVAREHDLEYNKLLEAGDNPYLKYNHADQEFQEKLEGDTSFGGNLGRAVFQAKKRVLEPFGLAEEAPAKTAPGKKRPRPIEPPPSSENSVDEDLVERQAQRQRLGFQDGPGNSANQVQQQPAANMASAEVAAGSGGPMGDNAQGADGVGSSSGNWHCDSLWMGDRVMRFPWMGDRVITKSTRTWSLPTYNNHLYKQINSNSDVTDEKYFGYSTPWGYFDFNRFHCHFSPRDWQRLINNHWGMRPKRLNFKLFNIQVKEVTTNDGTTTIANNLTSTVQIFADSEYQLPYVLGNAHEGCLPPFPADVFMLPQYGYLTLNDGNQVIPQSSFYCLEYFPSQMLRTGNNFSFSYEFENVPFHSMFMHNQSLDRLMNPLMDQYLWYLTATNGVQLHFKKSKKGAFASQFRNWLPGPNQRRQQWSKGAGNNNAQTILWSRKNKYRIMNRDSVAAPGLAQAAADGFITADGQLIFSNAGQQSDEAAGAKPPTTLLITDESETRPTNPGANTKWGEVADNQQTSSTAPTMAIDNEAHIFPGMVWQDRDIYLQGPIWAKIPETDGHFHPSPLMGGFGLRNPPPQILIKNTPVPANPPETFNANKINSFITQYSTGQVTVEIEWELKKEHSKRWNPEVQYTSNFASADSLQFTVNGEGVYIEDRPIGTRYLSHNI

SEQ ID NO: 202 - protein, 736 aa, synthetic construct
MSRVVMSFVDHPPDWLKEAAGGLREFLDLEPGAPKPKPNQQKQDQRGLVLPGYKYLGPFNGLDKGQPVNKADEVAREHDLEYNKLLEAGDNPYLKYNHADQEFQEKLEGDTSFGGNLGRAVFQAKKRVLEPFGLAEEAPAKTAPGKKRPRPIEPPPSSENSVDEDLVERQAQRQRLGFQDGPGNSANQVQQQPAANMASAEVAAGSGGPMGDNAQGADGVGSSSGNWHCDSLWMGDRVMRFPWMGDRVITKSTRTWSLPTYNNHLYKQINSNSDVTDEKYFGYSTPWGYFDFNRFHCHFSPRDWQRLINNHWGMRPKRLNFKLFNIQVKEVTTNDGTTTIANNLTSTVQIFADSEYQLPYVLGNAHEGCLPPFPADVFMLPQYGYLTLNDGNQVIPQSSFYCLEYFPSQMLRTGNNFSFSYEFENVPFHSMFMHNQSLDRLMNPLMDQYLWYLTATNGVQLHFKKSKKGAFASQFRNWLPGPNQRRQQWSKGAGNNNAQTILWSYKNKYRIMNRDSVAAPGLAQAAADGFITADGQLIFSNAGQQSDEAAGAKPPTTLLITDESETRPTNPGANTKWGEVADNQQTSSTAPTMAIDNEAHIFPGMVWQDRDIYLQGPIWAKIPETDGHFHPSPLMGGFGLRNPPPQILIKNTPVPANPPETFNANKINSFITQYSTGQVTVEIEWELKKEHSKRWNPEVQYTSNFCSADSLQFTVNGEGVYIEDRPIGTRYLSHNI

SEQ ID NO: 203 - protein, 736 aa, synthetic construct
MSRVVMSFVDHPPDWLKEAAGGLREFLDLEPGAPKPKPNQQKQDQRGLVLPGYKYLGPFNGLDKGQPVNKADEVAREHDLEYNKLLEAGDNPYLKYNHADQEFQEKLEGDTSFGGNLGRAVFQAKKRVLEPFGLAEEAPAKTAPGKKRPRPIEPPPSSENSVDEDLVERQAQRQRLGFQDGPGNSANQVQQQPAANMASAEVAAGSGGPMGDNAQGADGVGSSSGNWHCDSLWMGDRVMRFPWMGDRVITKSTRTWSLPTYNNHLYKQINSNSDVTDEKYFGYSTPWGYFDFNRFHCHFSPRDWQRLINNHWGMRPKRLNFKLFNIQVKEVTTNDGTTTIANNLTSTVQIFADSEYQLPYVLGNAHEGCLPPFPADVFMLPQYGYLTLNDGNQVIPQSSFYCLEYFPSQMLRTGNNFSFSYEFENVPFHSMFMHNQSLDRLMNPLMDQYLWYLTATNGVQLHFKKSKKGAFASQFRNWLPGPNQRRQQWSKGAGNNNAQTNLWSRKNKYRIMNRDSVAAPGLAQAAADGFITADGQLIFSNAGQQSDEAAGAKPPTTLLITDESETRPTNPGANTKWGEVADNQQTSSTAPTMAIDNEAHIFPGMVWQDRDIYLQGPIWAKIPETDGHFHPSPLMGGFGLRNPPPQILIKNTPVPANPPETFNANKINSFITQYSTGQVTVEIEWELKKEHSKRWNPEVQYTSNFCSADSLQFTVNGEGVYIEDRPIGTRYLSHNI

SEQ ID NO: 204 - protein, 736 aa, synthetic construct
MSRVVMSFVDHPPDWLKEAAGGLREFLDLEPGAPKPKPNQQKQDQRGLVLPGYKYLGPFNGLDKGQPVNKADEVAREHDLEYNKLLEAGDNPYLKYNHADQEFQEKLEGDTSFGGNLGRAVFQAKKRVLEPFGLAEEAPAKTAPGKKRPRPIEPPPSSENSVDEDLVERQAQRQRLGFQDGPGNSANQVQQQPAANMASAEVAAGSGGPMGDNAQGADGVGSSSGNWHCDSLWMGDRVMRFPWMGDRVITKSTRTWSLPTYNNHLYKQINSNSDVTDEKYFGYSTPWGYFDFNRFHCHFSPRDWQRLINNHWGMRPKRLNFKLFNIQVKEVTTNDGTTTIANNLTSTVQIFADSEYQLPYVLGNAHEGCLPPFPADVFMLPQYGYLTLNDGNQVIPQSSFYCLEYFPSQMLRTGNNFSFSYEFENVPFHSMFMHNQSLDRLMNPLMDQYLWYLTATNGVQLHFKKSKKGAFASQFRNWLPGPNQRRQQWSKGAGNNNAQTILWSRKNKYRIMNRDSVAAPGLAQAAADGFITADGQLIFSNAGQQSDEAAGAKPPTTLLITDESETRPTNPGANTKWGEVADNQQTSSTAPTMAIDNEAHIFPGMVWQDRDIYLQGPIWAKIPETDGHFHPSPLMGGFGLRNPPPQILIKNTPVPANPPETFNANKINSFITQYSTGQVTVEIEWELKKEHSKRWNPEVQYTSNFCSADSLQFTVNGEGVYIEDRPIGTRYLSHNI

SEQ ID NO: 205 - protein, 735 aa, synthetic construct
MAADGYLPDWLEDTLSEGIRQWWKLKPGPPPPKPAERHKDDSRGLVLPGYKYLGPFNGLDKGEPVNEADAAALEHDKAYDRQLDSGDNPYLKYNHADAEFQERLKEDTSFGGNLGRAVFQAKKRVLEPLGLVEEPVKTAPGKKRPVEHSPVEPDSSSGTGKAGQQPARKRLNFGQTGDADSVPDPQPLGQPPAAPSGLGTNTMATGSGAPMADNNEGADGVGNSSGNWHCDSTWMGDRVITTSTRTWALPTYNNHLYKQISSQSGASNDNHYFGYSTPWGYFDFNRFHCHFSPRDWQRLINNNWGFRPKRLNFKLFNIQVKEVTQNDGTTTIANNLTSTVQVFTDSEYQLPYVLGSAHQGCLPPFPADVFMVPQYGYLTLNNGSQAVGRSSFYCLEYFPSQMLRTGNNFTFSYTFEDVPFHSSYAHSQSLDRLMNPLIDQYLYYLSRTNTPSGTTTQSRLQFSQAGASDIRDQSRNWLPGPCYRQQRVSKTSADNNNSEISWTGATKYHLNGRDSLVNPGPAMASHKDDEEKFFPQSGVLIFGKQGSEKTNVDIEKVMITDEEEIRTTNPVATEQYGSVSTNLQRGNRQAATADVNTQGVLPGMVWQDRDVYLQGPIWAKIPHTDGHFHPSPLMGGFGLKHPPPQILIKNTPVPANPSTTFSAAKFASFITQYSTGQVSVEIEWELQKENSKRWNPEIQYTSNYNKSVNVDFTVDTNGVYSEPRPIGTRYLTRNL

SEQ ID NO: 206 - protein, 735 aa, synthetic construct
MAADGYLPDWLEDTLSEGIRQWWKLKPGPPPPKPAERHKDDSRGLVLPGYKYLGPFNGLDKGEPVNEADAAALEHDKAYDRQLDSGDNPYLKYNHADAEFQERLKEDTSFGGNLGRAVFQAKKRVLEPLGLVEEPVKTAPGKKRPVEHSPVEPDSSSGTGKAGQQPARKRLNFGQTGDADSVPDPQPLGQPPAAPSGLGTNTMATGSGAPMADNNEGADGVGNSSGNWHCDSTWMGDRVITTSTRTWALPTYNNHLYKQISSQSGASNDNHYFGYSTPWGYFDFNRFHCHFSPRDWQRLINNNWGFRPKRLNFKLFNIQVKEVTQNDGTTTIANNLTSTVQVFTDSEYQLPYVLGSAHQGCLPPFPADVFMVPQYGYLTLNNGSQAVGRSSFYCLEYFPSQMLRTGNNFTFSYTFEDVPFHSSYAHSQSLDRLMNPLIDQYLYYLSRTNTPSGTTTQSRLQFSQAGASDIRDQSRNWLPGPCYRQQRVSKTSADNNNSEYSWTRATKYHLNGRDSLVNPGPAMASHKDDEEKFFPQSGVLIFGKQGSEKTNVDIEKVMITDEEEIRTTNPVATEQYGSVSTNLQRGNRQAATADVNTQGVLPGMVWQDRDVYLQGPIWAKIPHTDGHFHPSPLMGGFGLKHPPPQILIKNTPVPANPSTTFSAAKFASFITQYSTGQVSVEIEWELQKENSKRWNPEIQYTSNYNKSVNVDFTVDTNGVYSEPRPIGTRYLTRNL

SEQ ID NO: 207 - protein, 735 aa, synthetic construct
MAADGYLPDWLEDTLSEGIRQWWKLKPGPPPPKPAERHKDDSRGLVLPGYKYLGPFNGLDKGEPVNEADAAALEHDKAYDRQLDSGDNPYLKYNHADAEFQERLKEDTSFGGNLGRAVFQAKKRVLEPLGLVEEPVKTAPGKKRPVEHSPVEPDSSSGTGKAGQQPARKRLNFGQTGDADSVPDPQPLGQPPAAPSGLGTNTMATGSGAPMADNNEGADGVGNSSGNWHCDSTWMGDRVITTSTRTWALPTYNNHLYKQISSQSGASNDNHYFGYSTPWGYFDFNRFHCHFSPRDWQRLINNNWGFRPKRLNFKLFNIQVKEVTQNDGTTTIANNLTSTVQVFTDSEYQLPYVLGSAHQGCLPPFPADVFMVPQYGYLTLNNGSQAVGRSSFYCLEYFPSQMLRTGNNFTFSYTFEDVPFHSSYAHSQSLDRLMNPLIDQYLYYLSRTNTPSGTTTQSRLQFSQAGASDIRDQSRNWLPGPCYRQQRVSKTSADNNNSEYSWTGATKYHLNGRDSLVNPGPAMASHKDDEEKFFPQSGVLIFGKQGSEKTNVDIEKVMITDEEEIRTTNPVATEQYGSVSTNLQRGNRQAATADVNTQGVLPGMVWQDRDVYLQGPIWAKIPHTDGHFHPSPLMGGFGLKHPPPQILIKNTPVPANPSTTFSAAKFASFITQYSTGQVSVEIEWELQKENSKRWNPEIQYTSNYCKSVNVDFTVDTNGVYSEPRPIGTRYLTRNL

SEQ ID NO: 208 - protein, 735 aa, synthetic construct
MAADGYLPDWLEDTLSEGIRQWWKLKPGPPPPKPAERHKDDSRGLVLPGYKYLGPFNGLDKGEPVNEADAAALEHDKAYDRQLDSGDNPYLKYNHADAEFQERLKEDTSFGGNLGRAVFQAKKRVLEPLGLVEEPVKTAPGKKRPVEHSPVEPDSSSGTGKAGQQPARKRLNFGQTGDADSVPDPQPLGQPPAAPSGLGTNTMATGSGAPMADNNEGADGVGNSSGNWHCDSTWMGDRVITTSTRTWALPTYNNHLYKQISSQSGASNDNHYFGYSTPWGYFDFNRFHCHFSPRDWQRLINNNWGFRPKRLNFKLFNIQVKEVTQNDGTTTIANNLTSTVQVFTDSEYQLPYVLGSAHQGCLPPFPADVFMVPQYGYLTLNNGSQAVGRSSFYCLEYFPSQMLRTGNNFTFSYTFEDVPFHSSYAHSQSLDRLMNPLIDQYLYYLSRTNTPSGTTTQSRLQFSQAGASDIRDQSRNWLPGPCYRQQRVSKTSADNNNSEISWTRATKYHLNGRDSLVNPGPAMASHKDDEEKFFPQSGVLIFGKQGSEKTNVDIEKVMITDEEEIRTTNPVATEQYGSVSTNLQRGNRQAATADVNTQGVLPGMVWQDRDVYLQGPIWAKIPHTDGHFHPSPLMGGFGLKHPPPQILIKNTPVPANPSTTFSAAKFASFITQYSTGQVSVEIEWELQKENSKRWNPEIQYTSNYNKSVNVDFTVDTNGVYSEPRPIGTRYLTRNL

SEQ ID NO: 209 - protein, 735 aa, synthetic construct
MAADGYLPDWLEDTLSEGIRQWWKLKPGPPPPKPAERHKDDSRGLVLPGYKYLGPFNGLDKGEPVNEADAAALEHDKAYDRQLDSGDNPYLKYNHADAEFQERLKEDTSFGGNLGRAVFQAKKRVLEPLGLVEEPVKTAPGKKRPVEHSPVEPDSSSGTGKAGQQPARKRLNFGQTGDADSVPDPQPLGQPPAAPSGLGTNTMATGSGAPMADNNEGADGVGNSSGNWHCDSTWMGDRVITTSTRTWALPTYNNHLYKQISSQSGASNDNHYFGYSTPWGYFDFNRFHCHFSPRDWQRLINNNWGFRPKRLNFKLFNIQVKEVTQNDGTTTIANNLTSTVQVFTDSEYQLPYVLGSAHQGCLPPFPADVFMVPQYGYLTLNNGSQAVGRSSFYCLEYFPSQMLRTGNNFTFSYTFEDVPFHSSYAHSQSLDRLMNPLIDQYLYYLSRTNTPSGTTTQSRLQFSQAGASDIRDQSRNWLPGPCYRQQRVSKTSADNNNSEISWTGATKYHLNGRDSLVNPGPAMASHKDDEEKFFPQSGVLIFGKQGSEKTNVDIEKVMITDEEEIRTTNPVATEQYGSVSTNLQRGNRQAATADVNTQGVLPGMVWQDRDVYLQGPIWAKIPHTDGHFHPSPLMGGFGLKHPPPQILIKNTPVPANPSTTFSAAKFASFITQYSTGQVSVEIEWELQKENSKRWNPEIQYTSNYCKSVNVDFTVDTNGVYSEPRPIGTRYLTRNL

SEQ ID NO: 210 - protein, 735 aa, synthetic construct
MAADGYLPDWLEDTLSEGIRQWWKLKPGPPPPKPAERHKDDSRGLVLPGYKYLGPFNGLDKGEPVNEADAAALEHDKAYDRQLDSGDNPYLKYNHADAEFQERLKEDTSFGGNLGRAVFQAKKRVLEPLGLVEEPVKTAPGKKRPVEHSPVEPDSSSGTGKAGQQPARKRLNFGQTGDADSVPDPQPLGQPPAAPSGLGTNTMATGSGAPMADNNEGADGVGNSSGNWHCDSTWMGDRVITTSTRTWALPTYNNHLYKQISSQSGASNDNHYFGYSTPWGYFDFNRFHCHFSPRDWQRLINNNWGFRPKRLNFKLFNIQVKEVTQNDGTTTIANNLTSTVQVFTDSEYQLPYVLGSAHQGCLPPFPADVFMVPQYGYLTLNNGSQAVGRSSFYCLEYFPSQMLRTGNNFTFSYTFEDVPFHSSYAHSQSLDRLMNPLIDQYLYYLSRTNTPSGTTTQSRLQFSQAGASDIRDQSRNWLPGPCYRQQRVSKTSADNNNSEYSWTRATKYHLNGRDSLVNPGPAMASHKDDEEKFFPQSGVLIFGKQGSEKTNVDIEKVMITDEEEIRTTNPVATEQYGSVSTNLQRGNRQAATADVNTQGVLPGMVWQDRDVYLQGPIWAKIPHTDGHFHPSPLMGGFGLKHPPPQILIKNTPVPANPSTTFSAAKFASFITQYSTGQVSVEIEWELQKENSKRWNPEIQYTSNYCKSVNVDFTVDTNGVYSEPRPIGTRYLTRNL

SEQ ID NO: 211 - protein, 735 aa, synthetic construct
MAADGYLPDWLEDTLSEGIRQWWKLKPGPPPPKPAERHKDDSRGLVLPGYKYLGPFNGLDKGEPVNEADAAALEHDKAYDRQLDSGDNPYLKYNHADAEFQERLKEDTSFGGNLGRAVFQAKKRVLEPLGLVEEPVKTAPGKKRPVEHSPVEPDSSSGTGKAGQQPARKRLNFGQTGDADSVPDPQPLGQPPAAPSGLGTNTMATGSGAPMADNNEGADGVGNSSGNWHCDSTWMGDRVITTSTRTWALPTYNNHLYKQISSQSGASNDNHYFGYSTPWGYFDFNRFHCHFSPRDWQRLINNNWGFRPKRLNFKLFNIQVKEVTQNDGTTTIANNLTSTVQVFTDSEYQLPYVLGSAHQGCLPPFPADVFMVPQYGYLTLNNGSQAVGRSSFYCLEYFPSQMLRTGNNFTFSYTFEDVPFHSSYAHSQSLDRLMNPLIDQYLYYLSRTNTPSGTTTQSRLQFSQAGASDIRDQSRNWLPGPCYRQQRVSKTSADNNNSEISWTRATKYHLNGRDSLVNPGPAMASHKDDEEKFFPQSGVLIFGKQGSEKTNVDIEKVMITDEEEIRTTNPVATEQYGSVSTNLQRGNRQAATADVNTQGVLPGMVWQDRDVYLQGPIWAKIPHTDGHFHPSPLMGGFGLKHPPPQILIKNTPVPANPSTTFSAAKFASFITQYSTGQVSVEIEWELQKENSKRWNPEIQYTSNYCKSVNVDFTVDTNGVYSEPRPIGTRYLTRNL

SEQ ID NO: 212 - protein, 735 aa, synthetic construct
MAADGYLPDWLEDTLSEGIRQWWKLKPGPPPPKPAERHKDDSRGLVLPGYKYLGPFNGLDKGEPVNEADAAALEHDKAYDRQLDSGDNPYLKYNHADAEFQERLKEDTSFGGNLGRAVFQAKKRVLEPLGLVEEPVKTAPGKKRPVEHSPVEPDSSSGTGKAGQQPARKRLNFGQTGDADSVPDPQPLGQPPAAPSGLGTNTMATGSGAPMADNNEGADGVGNSSGNWHCDSTWMGDRVITTSTRTWALPTYNNHLYKQISSQSGASNDNHYFGYSTPWGYFDFNRFHCHFSPRDWQRLINNNWGFRPKRLNFKLFNIQVKEVTQNDGTTTIANNLTSTVQVFADSEYQLPYVLGSAHQGCLPPFPADVFMVPQYGYLTLNNGSQAVGRSSFYCLEYFPSQMLRTGNNFTFSYTFEDVPFHSSYAHSQSLDRLMNPLIDQYLYYLSRTNTPSGTTTQSRLQFSQAGASDIRDQSRNWLPGPCYRQQRVSKTSADNNNSEYSWTGATKYHLNGRDSLVNPGPAMASHKDDEEKFFPQSGVLIFGKQGSEKTNVDIEKVMITDEEEIRTTNPVATEQYGSVSTNLQRGNRQAATADVNTQGVLPGMVWQDRDVYLQGPIWAKIPHTDGHFHPSPLMGGFGLKHPPPQILIKNTPVPANPSTTFSAAKFASFITQYSTGQVSVEIEWELQKENSKRWNPEIQYTSNYNKSVNVDFTVDTNGVYSEPRPIGTRYLTRNL

SEQ ID NO: 213 - protein, 735 aa, synthetic construct
MAADGYLPDWLEDTLSEGIRQWWKLKPGPPPPKPAERHKDDSRGLVLPGYKYLGPFNGLDKGEPVNEADAAALEHDKAYDRQLDSGDNPYLKYNHADAEFQERLKEDTSFGGNLGRAVFQAKKRVLEPLGLVEEPVKTAPGKKRPVEHSPVEPDSSSGTGKAGQQPARKRLNFGQTGDADSVPDPQPLGQPPAAPSGLGTNTMATGSGAPMADNNEGADGVGNSSGNWHCDSTWMGDRVITTSTRTWALPTYNNHLYKQISSQSGASNDNHYFGYSTPWGYFDFNRFHCHFSPRDWQRLINNNWGFRPKRLNFKLFNIQVKEVTQNDGTTTIANNLTSTVQVFADSEYQLPYVLGSAHQGCLPPFPADVFMVPQYGYLTLNNGSQAVGRSSFYCLEYFPSQMLRTGNNFTFSYTFEDVPFHSSYAHSQSLDRLMNPLIDQYLYYLSRTNTPSGTTTQSRLQFSQAGASDIRDQSRNWLPGPCYRQQRVSKTSADNNNSEISWTGATKYHLNGRDSLVNPGPAMASHKDDEEKFFPQSGVLIFGKQGSEKTNVDIEKVMITDEEEIRTTNPVATEQYGSVSTNLQRGNRQAATADVNTQGVLPGMVWQDRDVYLQGPIWAKIPHTDGHFHPSPLMGGFGLKHPPPQILIKNTPVPANPSTTFSAAKFASFITQYSTGQVSVEIEWELQKENSKRWNPEIQYTSNYNKSVNVDFTVDTNGVYSEPRPIGTRYLTRNL

SEQ ID NO: 214 - protein, 735 aa, synthetic construct
MAADGYLPDWLEDTLSEGIRQWWKLKPGPPPPKPAERHKDDSRGLVLPGYKYLGPFNGLDKGEPVNEADAAALEHDKAYDRQLDSGDNPYLKYNHADAEFQERLKEDTSFGGNLGRAVFQAKKRVLEPLGLVEEPVKTAPGKKRPVEHSPVEPDSSSGTGKAGQQPARKRLNFGQTGDADSVPDPQPLGQPPAAPSGLGTNTMATGSGAPMADNNEGADGVGNSSGNWHCDSTWMGDRVITTSTRTWALPTYNNHLYKQISSQSGASNDNHYFGYSTPWGYFDFNRFHCHFSPRDWQRLINNNWGFRPKRLNFKLFNIQVKEVTQNDGTTTIANNLTSTVQVFADSEYQLPYVLGSAHQGCLPPFPADVFMVPQYGYLTLNNGSQAVGRSSFYCLEYFPSQMLRTGNNFTFSYTFEDVPFHSSYAHSQSLDRLMNPLIDQYLYYLSRTNTPSGTTTQSRLQFSQAGASDIRDQSRNWLPGPCYRQQRVSKTSADNNNSEYSWTRATKYHLNGRDSLVNPGPAMASHKDDEEKFFPQSGVLIFGKQGSEKTNVDIEKVMITDEEEIRTTNPVATEQYGSVSTNLQRGNRQAATADVNTQGVLPGMVWQDRDVYLQGPIWAKIPHTDGHFHPSPLMGGFGLKHPPPQILIKNTPVPANPSTTFSAAKFASFITQYSTGQVSVEIEWELQKENSKRWNPEIQYTSNYNKSVNVDFTVDTNGVYSEPRPIGTRYLTRNL

SEQ ID NO: 215 - protein, 735 aa, synthetic construct
MAADGYLPDWLEDTLSEGIRQWWKLKPGPPPPKPAERHKDDSRGLVLPGYKYLGPFNGLDKGEPVNEADAAALEHDKAYDRQLDSGDNPYLKYNHADAEFQERLKEDTSFGGNLGRAVFQAKKRVLEPLGLVEEPVKTAPGKKRPVEHSPVEPDSSSGTGKAGQQPARKRLNFGQTGDADSVPDPQPLGQPPAAPSGLGTNTMATGSGAPMADNNEGADGVGNSSGNWHCDSTWMGDRVITTSTRTWALPTYNNHLYKQISSQSGASNDNHYFGYSTPWGYFDFNRFHCHFSPRDWQRLINNNWGFRPKRLNFKLFNIQVKEVTQNDGTTTIANNLTSTVQVFADSEYQLPYVLGSAHQGCLPPFPADVFMVPQYGYLTLNNGSQAVGRSSFYCLEYFPSQMLRTGNNFTFSYTFEDVPFHSSYAHSQSLDRLMNPLIDQYLYYLSRTNTPSGTTTQSRLQFSQAGASDIRDQSRNWLPGPCYRQQRVSKTSADNNNSEYSWTGATKYHLNGRDSLVNPGPAMASHKDDEEKFFPQSGVLIFGKQGSEKTNVDIEKVMITDEEEIRTTNPVATEQYGSVSTNLQRGNRQAATADVNTQGVLPGMVWQDRDVYLQGPIWAKIPHTDGHFHPSPLMGGFGLKHPPPQILIKNTPVPANPSTTFSAAKFASFITQYSTGQVSVEIEWELQKENSKRWNPEIQYTSNYCKSVNVDFTVDTNGVYSEPRPIGTRYLTRNL

SEQ ID NO: 216 - protein, 735 aa, synthetic construct
MAADGYLPDWLEDTLSEGIRQWWKLKPGPPPPKPAERHKDDSRGLVLPGYKYLGPFNGLDKGEPVNEADAAALEHDKAYDRQLDSGDNPYLKYNHADAEFQERLKEDTSFGGNLGRAVFQAKKRVLEPLGLVEEPVKTAPGKKRPVEHSPVEPDSSSGTGKAGQQPARKRLNFGQTGDADSVPDPQPLGQPPAAPSGLGTNTMATGSGAPMADNNEGADGVGNSSGNWHCDSTWMGDRVITTSTRTWALPTYNNHLYKQISSQSGASNDNHYFGYSTPWGYFDFNRFHCHFSPRDWQRLINNNWGFRPKRLNFKLFNIQVKEVTQNDGTTTIANNLTSTVQVFADSEYQLPYVLGSAHQGCLPPFPADVFMVPQYGYLTLNNGSQAVGRSSFYCLEYFPSQMLRTGNNFTFSYTFEDVPFHSSYAHSQSLDRLMNPLIDQYLYYLSRTNTPSGTTTQSRLQFSQAGASDIRDQSRNWLPGPCYRQQRVSKTSADNNNSEISWTRATKYHLNGRDSLVNPGPAMASHKDDEEKFFPQSGVLIFGKQGSEKTNVDIEKVMITDEEEIRTTNPVATEQYGSVSTNLQRGNRQAATADVNTQGVLPGMVWQDRDVYLQGPIWAKIPHTDGHFHPSPLMGGFGLKHPPPQILIKNTPVPANPSTTFSAAKFASFITQYSTGQVSVEIEWELQKENSKRWNPEIQYTSNYNKSVNVDFTVDTNGVYSEPRPIGTRYLTRNL

SEQ ID NO: 217 - protein, 735 aa, synthetic construct
MAADGYLPDWLEDTLSEGIRQWWKLKPGPPPPKPAERHKDDSRGLVLPGYKYLGPFNGLDKGEPVNEADAAALEHDKAYDRQLDSGDNPYLKYNHADAEFQERLKEDTSFGGNLGRAVFQAKKRVLEPLGLVEEPVKTAPGKKRPVEHSPVEPDSSSGTGKAGQQPARKRLNFGQTGDADSVPDPQPLGQPPAAPSGLGTNTMATGSGAPMADNNEGADGVGNSSGNWHCDSTWMGDRVITTSTRTWALPTYNNHLYKQISSQSGASNDNHYFGYSTPWGYFDFNRFHCHFSPRDWQRLINNNWGFRPKRLNFKLFNIQVKEVTQNDGTTTIANNLTSTVQVFADSEYQLPYVLGSAHQGCLPPFPADVFMVPQYGYLTLNNGSQAVGRSSFYCLEYFPSQMLRTGNNFTFSYTFEDVPFHSSYAHSQSLDRLMNPLIDQYLYYLSRTNTPSGTTTQSRLQFSQAGASDIRDQSRNWLPGPCYRQQRVSKTSADNNNSEISWTGATKYHLNGRDSLVNPGPAMASHKDDEEKFFPQSGVLIFGKQGSEKTNVDIEKVMITDEEEIRTTNPVATEQYGSVSTNLQRGNRQAATADVNTQGVLPGMVWQDRDVYLQGPIWAKIPHTDGHFHPSPLMGGFGLKHPPPQILIKNTPVPANPSTTFSAAKFASFITQYSTGQVSVEIEWELQKENSKRWNPEIQYTSNYCKSVNVDFTVDTNGVYSEPRPIGTRYLTRNL

SEQ ID NO: 218 - protein, 735 aa, synthetic construct
MAADGYLPDWLEDTLSEGIRQWWKLKPGPPPPKPAERHKDDSRGLVLPGYKYLGPFNGLDKGEPVNEADAAALEHDKAYDRQLDSGDNPYLKYNHADAEFQERLKEDTSFGGNLGRAVFQAKKRVLEPLGLVEEPVKTAPGKKRPVEHSPVEPDSSSGTGKAGQQPARKRLNFGQTGDADSVPDPQPLGQPPAAPSGLGTNTMATGSGAPMADNNEGADGVGNSSGNWHCDSTWMGDRVITTSTRTWALPTYNNHLYKQISSQSGASNDNHYFGYSTPWGYFDFNRFHCHFSPRDWQRLINNNWGFRPKRLNFKLFNIQVKEVTQNDGTTTIANNLTSTVQVFADSEYQLPYVLGSAHQGCLPPFPADVFMVPQYGYLTLNNGSQAVGRSSFYCLEYFPSQMLRTGNNFTFSYTFEDVPFHSSYAHSQSLDRLMNPLIDQYLYYLSRTNTPSGTTTQSRLQFSQAGASDIRDQSRNWLPGPCYRQQRVSKTSADNNNSEYSWTRATKYHLNGRDSLVNPGPAMASHKDDEEKFFPQSGVLIFGKQGSEKTNVDIEKVMITDEEEIRTTNPVATEQYGSVSTNLQRGNRQAATADVNTQGVLPGMVWQDRDVYLQGPIWAKIPHTDGHFHPSPLMGGFGLKHPPPQILIKNTPVPANPSTTFSAAKFASFITQYSTGQVSVEIEWELQKENSKRWNPEIQYTSNYCKSVNVDFTVDTNGVYSEPRPIGTRYLTRNL

SEQ ID NO: 219 - protein, 735 aa, synthetic construct
MAADGYLPDWLEDTLSEGIRQWWKLKPGPPPPKPAERHKDDSRGLVLPGYKYLGPFNGLDKGEPVNEADAAALEHDKAYDRQLDSGDNPYLKYNHADAEFQERLKEDTSFGGNLGRAVFQAKKRVLEPLGLVEEPVKTAPGKKRPVEHSPVEPDSSSGTGKAGQQPARKRLNFGQTGDADSVPDPQPLGQPPAAPSGLGTNTMATGSGAPMADNNEGADGVGNSSGNWHCDSTWMGDRVITTSTRTWALPTYNNHLYKQISSQSGASNDNHYFGYSTPWGYFDFNRFHCHFSPRDWQRLINNNWGFRPKRLNFKLFNIQVKEVTQNDGTTTIANNLTSTVQVFADSEYQLPYVLGSAHQGCLPPFPADVFMVPQYGYLTLNNGSQAVGRSSFYCLEYFPSQMLRTGNNFTFSYTFEDVPFHSSYAHSQSLDRLMNPLIDQYLYYLSRTNTPSGTTTQSRLQFSQAGASDIRDQSRNWLPGPCYRQQRVSKTSADNNNSEISWTRATKYHLNGRDSLVNPGPAMASHKDDEEKFFPQSGVLIFGKQGSEKTNVDIEKVMITDEEEIRTTNPVATEQYGSVSTNLQRGNRQAATADVNTQGVLPGMVWQDRDVYLQGPIWAKIPHTDGHFHPSPLMGGFGLKHPPPQILIKNTPVPANPSTTFSAAKFASFITQYSTGQVSVEIEWELQKENSKRWNPEIQYTSNYCKSVNVDFTVDTNGVYSEPRPIGTRYLTRNL

SEQ ID NO: 220 - protein, 736 aa, synthetic construct
MAADGYLPDWLEDNLSEGIREWWALKPGVPQPKANQQHQDNRRGLVLPGYKYLGPGNGLDKGEPVNEADAAALEHDKAYDQQLKAGDNPYLKYNHADAEFQERLQEDTSFGGNLGRAVFQAKKRILEPLGLVEEAAKTAPGKKRPVDQSPQEPDSSSGVGKSGKQPARKRLNFGQTGDSESVPDPQPLGEPPAAPTSLGSNTMASGGGAPMADNNEGADGVGNSSGNWHCDSQWLGDRVITTSTRTWALPTYNNHLYKQISSQSGASNDNHYFGYSTPWGYFDFNRFHCHFSPRDWQRLINNNWGFRPKKLSFKLFNIQVKEVTQNDGTTTIANNLTSTVQVFTDSEYQLPYVLGSAHQGCLPPFPADVFMVPQYGYLTLNNGSQAVGRSSFYCLEYFPSQMLRTGNNFQFSYTFEDVPFHSSYAHSQSLDRLMNPLIDQYLYYLNRTQGTTSGTTNQSRLLFSQAGPQSMSLQARNWLPGPCYRQQRLSKTANDNNNSNIPWTAASKYHLNGRDSLVNPGPAMASHKDDEEKFFPMHGNLIFGKEGTTASNAELDNVMITDEEEIRTTNPVATEQYGTVANNLQSSNTAPTTRTVNDQGALPGMVWQDRDVYLQGPIWAKIPHTDGHFHPSPLMGGFGLKHPPPQIMIKNTPVPANPPTTFSPAKFASFITQYSTGQVSVEIEWELQKENSKRWNPEIQYTSNYNKSVNVDFTVDTNGVYSEPRPIGTRYLTRNL

SEQ ID NO: 221 - protein, 736 aa, synthetic construct
MAADGYLPDWLEDNLSEGIREWWALKPGVPQPKANQQHQDNRRGLVLPGYKYLGPGNGLDKGEPVNEADAAALEHDKAYDQQLKAGDNPYLKYNHADAEFQERLQEDTSFGGNLGRAVFQAKKRILEPLGLVEEAAKTAPGKKRPVDQSPQEPDSSSGVGKSGKQPARKRLNFGQTGDSESVPDPQPLGEPPAAPTSLGSNTMASGGGAPMADNNEGADGVGNSSGNWHCDSQWLGDRVITTSTRTWALPTYNNHLYKQISSQSGASNDNHYFGYSTPWGYFDFNRFHCHFSPRDWQRLINNNWGFRPKKLSFKLFNIQVKEVTQNDGTTTIANNLTSTVQVFTDSEYQLPYVLGSAHQGCLPPFPADVFMVPQYGYLTLNNGSQAVGRSSFYCLEYFPSQMLRTGNNFQFSYTFEDVPFHSSYAHSQSLDRLMNPLIDQYLYYLNRTQGTTSGTTNQSRLLFSQAGPQSMSLQARNWLPGPCYRQQRLSKTANDNNNSNFPWTRASKYHLNGRDSLVNPGPAMASHKDDEEKFFPMHGNLIFGKEGTTASNAELDNVMITDEEEIRTTNPVATEQYGTVANNLQSSNTAPTTRTVNDQGALPGMVWQDRDVYLQGPIWAKIPHTDGHFHPSPLMGGFGLKHPPPQIMIKNTPVPANPPTTFSPAKFASFITQYSTGQVSVEIEWELQKENSKRWNPEIQYTSNYNKSVNVDFTVDTNGVYSEPRPIGTRYLTRNL

SEQ ID NO: 222 - protein, 736 aa, synthetic construct
MAADGYLPDWLEDNLSEGIREWWALKPGVPQPKANQQHQDNRRGLVLPGYKYLGPGNGLDKGEPVNEADAAALEHDKAYDQQLKAGDNPYLKYNHADAEFQERLQEDTSFGGNLGRAVFQAKKRILEPLGLVEEAAKTAPGKKRPVDQSPQEPDSSSGVGKSGKQPARKRLNFGQTGDSESVPDPQPLGEPPAAPTSLGSNTMASGGGAPMADNNEGADGVGNSSGNWHCDSQWLGDRVITTSTRTWALPTYNNHLYKQISSQSGASNDNHYFGYSTPWGYFDFNRFHCHFSPRDWQRLINNNWGFRPKKLSFKLFNIQVKEVTQNDGTTTIANNLTSTVQVFTDSEYQLPYVLGSAHQGCLPPFPADVFMVPQYGYLTLNNGSQAVGRSSFYCLEYFPSQMLRTGNNFQFSYTFEDVPFHSSYAHSQSLDRLMNPLIDQYLYYLNRTQGTTSGTTNQSRLLFSQAGPQSMSLQARNWLPGPCYRQQRLSKTANDNNNSNFPWTAASKYHLNGRDSLVNPGPAMASHKDDEEKFFPMHGNLIFGKEGTTASNAELDNVMITDEEEIRTTNPVATEQYGTVANNLQSSNTAPTTRTVNDQGALPGMVWQDRDVYLQGPIWAKIPHTDGHFHPSPLMGGFGLKHPPPQIMIKNTPVPANPPTTFSPAKFASFITQYSTGQVSVEIEWELQKENSKRWNPEIQYTSNYCKSVNVDFTVDTNGVYSEPRPIGTRYLTRNL

SEQ ID NO: 223 - protein, 736 aa, synthetic construct
MAADGYLPDWLEDNLSEGIREWWALKPGVPQPKANQQHQDNRRGLVLPGYKYLGPGNGLDKGEPVNEADAAALEHDKAYDQQLKAGDNPYLKYNHADAEFQERLQEDTSFGGNLGRAVFQAKKRILEPLGLVEEAAKTAPGKKRPVDQSPQEPDSSSGVGKSGKQPARKRLNFGQTGDSESVPDPQPLGEPPAAPTSLGSNTMASGGGAPMADNNEGADGVGNSSGNWHCDSQWLGDRVITTSTRTWALPTYNNHLYKQISSQSGASNDNHYFGYSTPWGYFDFNRFHCHFSPRDWQRLINNNWGFRPKKLSFKLFNIQVKEVTQNDGTTTIANNLTSTVQVFTDSEYQLPYVLGSAHQGCLPPFPADVFMVPQYGYLTLNNGSQAVGRSSFYCLEYFPSQMLRTGNNFQFSYTFEDVPFHSSYAHSQSLDRLMNPLIDQYLYYLNRTQGTTSGTTNQSRLLFSQAGPQSMSLQARNWLPGPCYRQQRLSKTANDNNNSNIPWTRASKYHLNGRDSLVNPGPAMASHKDDEEKFFPMHGNLIFGKEGTTASNAELDNVMITDEEEIRTTNPVATEQYGTVANNLQSSNTAPTTRTVNDQGALPGMVWQDRDVYLQGPIWAKIPHTDGHFHPSPLMGGFGLKHPPPQIMIKNTPVPANPPTTFSPAKFASFITQYSTGQVSVEIEWELQKENSKRWNPEIQYTSNYNKSVNVDFTVDTNGVYSEPRPIGTRYLTRNL

SEQ ID NO: 224 - protein, 736 aa, synthetic construct
MAADGYLPDWLEDNLSEGIREWWALKPGVPQPKANQQHQDNRRGLVLPGYKYLGPGNGLDKGEPVNEADAAALEHDKAYDQQLKAGDNPYLKYNHADAEFQERLQEDTSFGGNLGRAVFQAKKRILEPLGLVEEAAKTAPGKKRPVDQSPQEPDSSSGVGKSGKQPARKRLNFGQTGDSESVPDPQPLGEPPAAPTSLGSNTMASGGGAPMADNNEGADGVGNSSGNWHCDSQWLGDRVITTSTRTWALPTYNNHLYKQISSQSGASNDNHYFGYSTPWGYFDFNRFHCHFSPRDWQRLINNNWGFRPKKLSFKLFNIQVKEVTQNDGTTTIANNLTSTVQVFTDSEYQLPYVLGSAHQGCLPPFPADVFMVPQYGYLTLNNGSQAVGRSSFYCLEYFPSQMLRTGNNFQFSYTFEDVPFHSSYAHSQSLDRLMNPLIDQYLYYLNRTQGTTSGTTNQSRLLFSQAGPQSMSLQARNWLPGPCYRQQRLSKTANDNNNSNIPWTAASKYHLNGRDSLVNPGPAMASHKDDEEKFFPMHGNLIFGKEGTTASNAELDNVMITDEEEIRTTNPVATEQYGTVANNLQSSNTAPTTRTVNDQGALPGMVWQDRDVYLQGPIWAKIPHTDGHFHPSPLMGGFGLKHPPPQIMIKNTPVPANPPTTFSPAKFASFITQYSTGQVSVEIEWELQKENSKRWNPEIQYTSNYCKSVNVDFTVDTNGVYSEPRPIGTRYLTRNL

SEQ ID NO: 225 - protein, 736 aa, synthetic construct
MAADGYLPDWLEDNLSEGIREWWALKPGVPQPKANQQHQDNRRGLVLPGYKYLGPGNGLDKGEPVNEADAAALEHDKAYDQQLKAGDNPYLKYNHADAEFQERLQEDTSFGGNLGRAVFQAKKRILEPLGLVEEAAKTAPGKKRPVDQSPQEPDSSSGVGKSGKQPARKRLNFGQTGDSESVPDPQPLGEPPAAPTSLGSNTMASGGGAPMADNNEGADGVGNSSGNWHCDSQWLGDRVITTSTRTWALPTYNNHLYKQISSQSGASNDNHYFGYSTPWGYFDFNRFHCHFSPRDWQRLINNNWGFRPKKLSFKLFNIQVKEVTQNDGTTTIANNLTSTVQVFTDSEYQLPYVLGSAHQGCLPPFPADVFMVPQYGYLTLNNGSQAVGRSSFYCLEYFPSQMLRTGNNFQFSYTFEDVPFHSSYAHSQSLDRLMNPLIDQYLYYLNRTQGTTSGTTNQSRLLFSQAGPQSMSLQARNWLPGPCYRQQRLSKTANDNNNSNFPWTRASKYHLNGRDSLVNPGPAMASHKDDEEKFFPMHGNLIFGKEGTTASNAELDNVMITDEEEIRTTNPVATEQYGTVANNLQSSNTAPTTRTVNDQGALPGMVWQDRDVYLQGPIWAKIPHTDGHFHPSPLMGGFGLKHPPPQIMIKNTPVPANPPTTFSPAKFASFITQYSTGQVSVEIEWELQKENSKRWNPEIQYTSNYCKSVNVDFTVDTNGVYSEPRPIGTRYLTRNL

SEQ ID NO: 226 - protein, 736 aa, synthetic construct
MAADGYLPDWLEDNLSEGIREWWALKPGVPQPKANQQHQDNRRGLVLPGYKYLGPGNGLDKGEPVNEADAAALEHDKAYDQQLKAGDNPYLKYNHADAEFQERLQEDTSFGGNLGRAVFQAKKRILEPLGLVEEAAKTAPGKKRPVDQSPQEPDSSSGVGKSGKQPARKRLNFGQTGDSESVPDPQPLGEPPAAPTSLGSNTMASGGGAPMADNNEGADGVGNSSGNWHCDSQWLGDRVITTSTRTWALPTYNNHLYKQISSQSGASNDNHYFGYSTPWGYFDFNRFHCHFSPRDWQRLINNNWGFRPKKLSFKLFNIQVKEVTQNDGTTTIANNLTSTVQVFTDSEYQLPYVLGSAHQGCLPPFPADVFMVPQYGYLTLNNGSQAVGRSSFYCLEYFPSQMLRTGNNFQFSYTFEDVPFHSSYAHSQSLDRLMNPLIDQYLYYLNRTQGTTSGTTNQSRLLFSQAGPQSMSLQARNWLPGPCYRQQRLSKTANDNNNSNIPWTRASKYHLNGRDSLVNPGPAMASHKDDEEKFFPMHGNLIFGKEGTTASNAELDNVMITDEEEIRTTNPVATEQYGTVANNLQSSNTAPTTRTVNDQGALPGMVWQDRDVYLQGPIWAKIPHTDGHFHPSPLMGGFGLKHPPPQIMIKNTPVPANPPTTFSPAKFASFITQYSTGQVSVEIEWELQKENSKRWNPEIQYTSNYCKSVNVDFTVDTNGVYSEPRPIGTRYLTRNL

SEQ ID NO: 227 - protein, 736 aa, synthetic construct
MAADGYLPDWLEDNLSEGIREWWALKPGVPQPKANQQHQDNRRGLVLPGYKYLGPGNGLDKGEPVNEADAAALEHDKAYDQQLKAGDNPYLKYNHADAEFQERLQEDTSFGGNLGRAVFQAKKRILEPLGLVEEAAKTAPGKKRPVDQSPQEPDSSSGVGKSGKQPARKRLNFGQTGDSESVPDPQPLGEPPAAPTSLGSNTMASGGGAPMADNNEGADGVGNSSGNWHCDSQWLGDRVITTSTRTWALPTYNNHLYKQISSQSGASNDNHYFGYSTPWGYFDFNRFHCHFSPRDWQRLINNNWGFRPKKLSFKLFNIQVKEVTQNDGTTTIANNLTSTVQVFADSEYQLPYVLGSAHQGCLPPFPADVFMVPQYGYLTLNNGSQAVGRSSFYCLEYFPSQMLRTGNNFQFSYTFEDVPFHSSYAHSQSLDRLMNPLIDQYLYYLNRTQGTTSGTTNQSRLLFSQAGPQSMSLQARNWLPGPCYRQQRLSKTANDNNNSNFPWTAASKYHLNGRDSLVNPGPAMASHKDDEEKFFPMHGNLIFGKEGTTASNAELDNVMITDEEEIRTTNPVATEQYGTVANNLQSSNTAPTTRTVNDQGALPGMVWQDRDVYLQGPIWAKIPHTDGHFHPSPLMGGFGLKHPPPQIMIKNTPVPANPPTTFSPAKFASFITQYSTGQVSVEIEWELQKENSKRWNPEIQYTSNYNKSVNVDFTVDTNGVYSEPRPIGTRYLTRNL

SEQ ID NO: 228 - protein, 736 aa, synthetic construct
MAADGYLPDWLEDNLSEGIREWWALKPGVPQPKANQQHQDNRRGLVLPGYKYLGPGNGLDKGEPVNEADAAALEHDKAYDQQLKAGDNPYLKYNHADAEFQERLQEDTSFGGNLGRAVFQAKKRILEPLGLVEEAAKTAPGKKRPVDQSPQEPDSSSGVGKSGKQPARKRLNFGQTGDSESVPDPQPLGEPPAAPTSLGSNTMASGGGAPMADNNEGADGVGNSSGNWHCDSQWLGDRVITTSTRTWALPTYNNHLYKQISSQSGASNDNHYFGYSTPWGYFDFNRFHCHFSPRDWQRLINNNWGFRPKKLSFKLFNIQVKEVTQNDGTTTIANNLTSTVQVFADSEYQLPYVLGSAHQGCLPPFPADVFMVPQYGYLTLNNGSQAVGRSSFYCLEYFPSQMLRTGNNFQFSYTFEDVPFHSSYAHSQSLDRLMNPLIDQYLYYLNRTQGTTSGTTNQSRLLFSQAGPQSMSLQARNWLPGPCYRQQRLSKTANDNNNSNIPWTAASKYHLNGRDSLVNPGPAMASHKDDEEKFFPMHGNLIFGKEGTTASNAELDNVMITDEEEIRTTNPVATEQYGTVANNLQSSNTAPTTRTVNDQGALPGMVWQDRDVYLQGPIWAKIPHTDGHFHPSPLMGGFGLKHPPPQIMIKNTPVPANPPTTFSPAKFASFITQYSTGQVSVEIEWELQKENSKRWNPEIQYTSNYNKSVNVDFTVDTNGVYSEPRPIGTRYLTRNL

SEQ ID NO: 229 - protein, 736 aa, synthetic construct
MAADGYLPDWLEDNLSEGIREWWALKPGVPQPKANQQHQDNRRGLVLPGYKYLGPGNGLDKGEPVNEADAAALEHDKAYDQQLKAGDNPYLKYNHADAEFQERLQEDTSFGGNLGRAVFQAKKRILEPLGLVEEAAKTAPGKKRPVDQSPQEPDSSSGVGKSGKQPARKRLNFGQTGDSESVPDPQPLGEPPAAPTSLGSNTMASGGGAPMADNNEGADGVGNSSGNWHCDSQWLGDRVITTSTRTWALPTYNNHLYKQISSQSGASNDNHYFGYSTPWGYFDFNRFHCHFSPRDWQRLINNNWGFRPKKLSFKLFNIQVKEVTQNDGTTTIANNLTSTVQVFADSEYQLPYVLGSAHQGCLPPFPADVFMVPQYGYLTLNNGSQAVGRSSFYCLEYFPSQMLRTGNNFQFSYTFEDVPFHSSYAHSQSLDRLMNPLIDQYLYYLNRTQGTTSGTTNQSRLLFSQAGPQSMSLQARNWLPGPCYRQQRLSKTANDNNNSNFPWTRASKYHLNGRDSLVNPGPAMASHKDDEEKFFPMHGNLIFGKEGTTASNAELDNVMITDEEEIRTTNPVATEQYGTVANNLQSSNTAPTTRTVNDQGALPGMVWQDRDVYLQGPIWAKIPHTDGHFHPSPLMGGFGLKHPPPQIMIKNTPVPANPPTTFSPAKFASFITQYSTGQVSVEIEWELQKENSKRWNPEIQYTSNYNKSVNVDFTVDTNGVYSEPRPIGTRYLTRNL

SEQ ID NO: 230 - protein, 736 aa, synthetic construct
MAADGYLPDWLEDNLSEGIREWWALKPGVPQPKANQQHQDNRRGLVLPGYKYLGPGNGLDKGEPVNEADAAALEHDKAYDQQLKAGDNPYLKYNHADAEFQERLQEDTSFGGNLGRAVFQAKKRILEPLGLVEEAAKTAPGKKRPVDQSPQEPDSSSGVGKSGKQPARKRLNFGQTGDSESVPDPQPLGEPPAAPTSLGSNTMASGGGAPMADNNEGADGVGNSSGNWHCDSQWLGDRVITTSTRTWALPTYNNHLYKQISSQSGASNDNHYFGYSTPWGYFDFNRFHCHFSPRDWQRLINNNWGFRPKKLSFKLFNIQVKEVTQNDGTTTIANNLTSTVQVFADSEYQLPYVLGSAHQGCLPPFPADVFMVPQYGYLTLNNGSQAVGRSSFYCLEYFPSQMLRTGNNFQFSYTFEDVPFHSSYAHSQSLDRLMNPLIDQYLYYLNRTQGTTSGTTNQSRLLFSQAGPQSMSLQARNWLPGPCYRQQRLSKTANDNNNSNFPWTAASKYHLNGRDSLVNPGPAMASHKDDEEKFFPMHGNLIFGKEGTTASNAELDNVMITDEEEIRTTNPVATEQYGTVANNLQSSNTAPTTRTVNDQGALPGMVWQDRDVYLQGPIWAKIPHTDGHFHPSPLMGGFGLKHPPPQIMIKNTPVPANPPTTFSPAKFASFITQYSTGQVSVEIEWELQKENSKRWNPEIQYTSNYCKSVNVDFTVDTNGVYSEPRPIGTRYLTRNL

SEQ ID NO: 231 - protein, 736 aa, synthetic construct
MAADGYLPDWLEDNLSEGIREWWALKPGVPQPKANQQHQDNRRGLVLPGYKYLGPGNGLDKGEPVNEADAAALEHDKAYDQQLKAGDNPYLKYNHADAEFQERLQEDTSFGGNLGRAVFQAKKRILEPLGLVEEAAKTAPGKKRPVDQSPQEPDSSSGVGKSGKQPARKRLNFGQTGDSESVPDPQPLGEPPAAPTSLGSNTMASGGGAPMADNNEGADGVGNSSGNWHCDSQWLGDRVITTSTRTWALPTYNNHLYKQISSQSGASNDNHYFGYSTPWGYFDFNRFHCHFSPRDWQRLINNNWGFRPKKLSFKLFNIQVKEVTQNDGTTTIANNLTSTVQVFADSEYQLPYVLGSAHQGCLPPFPADVFMVPQYGYLTLNNGSQAVGRSSFYCLEYFPSQMLRTGNNFQFSYTFEDVPFHSSYAHSQSLDRLMNPLIDQYLYYLNRTQGTTSGTTNQSRLLFSQAGPQSMSLQARNWLPGPCYRQQRLSKTANDNNNSNIPWTRASKYHLNGRDSLVNPGPAMASHKDDEEKFFPMHGNLIFGKEGTTASNAELDNVMITDEEEIRTTNPVATEQYGTVANNLQSSNTAPTTRTVNDQGALPGMVWQDRDVYLQGPIWAKIPHTDGHFHPSPLMGGFGLKHPPPQIMIKNTPVPANPPTTFSPAKFASFITQYSTGQVSVEIEWELQKENSKRWNPEIQYTSNYNKSVNVDFTVDTNGVYSEPRPIGTRYLTRNL

SEQ ID NO: 232 - protein, 736 aa, synthetic construct
MAADGYLPDWLEDNLSEGIREWWALKPGVPQPKANQQHQDNRRGLVLPGYKYLGPGNGLDKGEPVNEADAAALEHDKAYDQQLKAGDNPYLKYNHADAEFQERLQEDTSFGGNLGRAVFQAKKRILEPLGLVEEAAKTAPGKKRPVDQSPQEPDSSSGVGKSGKQPARKRLNFGQTGDSESVPDPQPLGEPPAAPTSLGSNTMASGGGAPMADNNEGADGVGNSSGNWHCDSQWLGDRVITTSTRTWALPTYNNHLYKQISSQSGASNDNHYFGYSTPWGYFDFNRFHCHFSPRDWQRLINNNWGFRPKKLSFKLFNIQVKEVTQNDGTTTIANNLTSTVQVFADSEYQLPYVLGSAHQGCLPPFPADVFMVPQYGYLTLNNGSQAVGRSSFYCLEYFPSQMLRTGNNFQFSYTFEDVPFHSSYAHSQSLDRLMNPLIDQYLYYLNRTQGTTSGTTNQSRLLFSQAGPQSMSLQARNWLPGPCYRQQRLSKTANDNNNSNIPWTAASKYHLNGRDSLVNPGPAMASHKDDEEKFFPMHGNLIFGKEGTTASNAELDNVMITDEEEIRTTNPVATEQYGTVANNLQSSNTAPTTRTVNDQGALPGMVWQDRDVYLQGPIWAKIPHTDGHFHPSPLMGGFGLKHPPPQIMIKNTPVPANPPTTFSPAKFASFITQYSTGQVSVEIEWELQKENSKRWNPEIQYTSNYCKSVNVDFTVDTNGVYSEPRPIGTRYLTRNL

SEQ ID NO: 233 - protein, 736 aa, synthetic construct
MAADGYLPDWLEDNLSEGIREWWALKPGVPQPKANQQHQDNRRGLVLPGYKYLGPGNGLDKGEPVNEADAAALEHDKAYDQQLKAGDNPYLKYNHADAEFQERLQEDTSFGGNLGRAVFQAKKRILEPLGLVEEAAKTAPGKKRPVDQSPQEPDSSSGVGKSGKQPARKRLNFGQTGDSESVPDPQPLGEPPAAPTSLGSNTMASGGGAPMADNNEGADGVGNSSGNWHCDSQWLGDRVITTSTRTWALPTYNNHLYKQISSQSGASNDNHYFGYSTPWGYFDFNRFHCHFSPRDWQRLINNNWGFRPKKLSFKLFNIQVKEVTQNDGTTTIANNLTSTVQVFADSEYQLPYVLGSAHQGCLPPFPADVFMVPQYGYLTLNNGSQAVGRSSFYCLEYFPSQMLRTGNNFQFSYTFEDVPFHSSYAHSQSLDRLMNPLIDQYLYYLNRTQGTTSGTTNQSRLLFSQAGPQSMSLQARNWLPGPCYRQQRLSKTANDNNNSNFPWTRASKYHLNGRDSLVNPGPAMASHKDDEEKFFPMHGNLIFGKEGTTASNAELDNVMITDEEEIRTTNPVATEQYGTVANNLQSSNTAPTTRTVNDQGALPGMVWQDRDVYLQGPIWAKIPHTDGHFHPSPLMGGFGLKHPPPQIMIKNTPVPANPPTTFSPAKFASFITQYSTGQVSVEIEWELQKENSKRWNPEIQYTSNYCKSVNVDFTVDTNGVYSEPRPIGTRYLTRNL

SEQ ID NO: 234 - protein, 736 aa, synthetic construct
MAADGYLPDWLEDNLSEGIREWWALKPGVPQPKANQQHQDNRRGLVLPGYKYLGPGNGLDKGEPVNEADAAALEHDKAYDQQLKAGDNPYLKYNHADAEFQERLQEDTSFGGNLGRAVFQAKKRILEPLGLVEEAAKTAPGKKRPVDQSPQEPDSSSGVGKSGKQPARKRLNFGQTGDSESVPDPQPLGEPPAAPTSLGSNTMASGGGAPMADNNEGADGVGNSSGNWHCDSQWLGDRVITTSTRTWALPTYNNHLYKQISSQSGASNDNHYFGYSTPWGYFDFNRFHCHFSPRDWQRLINNNWGFRPKKLSFKLFNIQVKEVTQNDGTTTIANNLTSTVQVFADSEYQLPYVLGSAHQGCLPPFPADVFMVPQYGYLTLNNGSQAVGRSSFYCLEYFPSQMLRTGNNFQFSYTFEDVPFHSSYAHSQSLDRLMNPLIDQYLYYLNRTQGTTSGTTNQSRLLFSQAGPQSMSLQARNWLPGPCYRQQRLSKTANDNNNSNIPWTRASKYHLNGRDSLVNPGPAMASHKDDEEKFFPMHGNLIFGKEGTTASNAELDNVMITDEEEIRTTNPVATEQYGTVANNLQSSNTAPTTRTVNDQGALPGMVWQDRDVYLQGPIWAKIPHTDGHFHPSPLMGGFGLKHPPPQIMIKNTPVPANPPTTFSPAKFASFITQYSTGQVSVEIEWELQKENSKRWNPEIQYTSNYCKSVNVDFTVDTNGVYSEPRPIGTRYLTRNL

SEQ ID NO: 235 - protein, 724 aa, synthetic construct
MSFVDHPPDWLEEVGEGLREFLGLEAGPPKPKPNQQHQDQARGLVLPGYNYLGPGNGLDRGEPVNRADEVAREHDISYNEQLEAGDNPYLKYNHADAEFQEKLADDTSFGGNLGKAVFQAKKRVLEPFGLVEEGAKTAPTGKRIDDHFPKRKKARTEEDSKPSTSSDAEAGPSGSQQLQIPAQPASSLGADTMSAGGGGPLGDNNQGADGVGNASGDWHCDSTWMGDRVVTKSTRTWVLPSYNNHQYREIKSGSVDGSNANAYFGYSTPWGYFDFNRFHSHWSPRDWQRLINNYWGFRPRSLRVKIFNIQVKEVTVQDSTTTIANNLTSTVQVFTDDDYQLPYVVGNGTEGCLPAFPPQVFTLPQYGYATLNRDNTENPTERSSFFCLEYFPSKMLRTGNNFEFTYNFEEVPFHSSFAPSQNLFKLANPLVDQYLYRFVSTNNTGGVQFNKNLAGRYANTYKNWFPGPMGRTQGWNLGSGVNRASVIAFATTNRMELEGASYQVPPQPNGMTNNLQGSNTYALENTMIFNSQPANPGTTATYLEGNMLITSESETQPVNRVAYNVGGQMATNNQSSTTAPATGTYNLQEIVPGSVWMERDVYLQGPIWAKIPETGAHFHPSPAMGGFGLKHPPPMMLIKNTPVPGNITSFSDVPVSSFITQYSTGQVTVEMEWELKKENSKRWNPEIQYTNNYNDPQFVDFAPDSTGEYRTTRPIGTRYLTRPL

SEQ ID NO: 236 - protein, 724 aa, synthetic construct
MSFVDHPPDWLEEVGEGLREFLGLEAGPPKPKPNQQHQDQARGLVLPGYNYLGPGNGLDRGEPVNRADEVAREHDISYNEQLEAGDNPYLKYNHADAEFQEKLADDTSFGGNLGKAVFQAKKRVLEPFGLVEEGAKTAPTGKRIDDHFPKRKKARTEEDSKPSTSSDAEAGPSGSQQLQIPAQPASSLGADTMSAGGGGPLGDNNQGADGVGNASGDWHCDSTWMGDRVVTKSTRTWVLPSYNNHQYREIKSGSVDGSNANAYFGYSTPWGYFDFNRFHSHWSPRDWQRLINNYWGFRPRSLRVKIFNIQVKEVTVQDSTTTIANNLTSTVQVFTDDDYQLPYVVGNGTEGCLPAFPPQVFTLPQYGYATLNRDNTENPTERSSFFCLEYFPSKMLRTGNNFEFTYNFEEVPFHSSFAPSQNLFKLANPLVDQYLYRFVSTNNTGGVQFNKNLAGRYANTYKNWFPGPMGRTQGWNLGSGVNRASVSAFARTNRMELEGASYQVPPQPNGMTNNLQGSNTYALENTMIFNSQPANPGTTATYLEGNMLITSESETQPVNRVAYNVGGQMATNNQSSTTAPATGTYNLQEIVPGSVWMERDVYLQGPIWAKIPETGAHFHPSPAMGGFGLKHPPPMMLIKNTPVPGNITSFSDVPVSSFITQYSTGQVTVEMEWELKKENSKRWNPEIQYTNNYNDPQFVDFAPDSTGEYRTTRPIGTRYLTRPL

SEQ ID NO: 237 - protein, 724 aa, synthetic construct
MSFVDHPPDWLEEVGEGLREFLGLEAGPPKPKPNQQHQDQARGLVLPGYNYLGPGNGLDRGEPVNRADEVAREHDISYNEQLEAGDNPYLKYNHADAEFQEKLADDTSFGGNLGKAVFQAKKRVLEPFGLVEEGAKTAPTGKRIDDHFPKRKKARTEEDSKPSTSSDAEAGPSGSQQLQIPAQPASSLGADTMSAGGGGPLGDNNQGADGVGNASGDWHCDSTWMGDRVVTKSTRTWVLPSYNNHQYREIKSGSVDGSNANAYFGYSTPWGYFDFNRFHSHWSPRDWQRLINNYWGFRPRSLRVKIFNIQVKEVTVQDSTTTIANNLTSTVQVFTDDDYQLPYVVGNGTEGCLPAFPPQVFTLPQYGYATLNRDNTENPTERSSFFCLEYFPSKMLRTGNNFEFTYNFEEVPFHSSFAPSQNLFKLANPLVDQYLYRFVSTNNTGGVQFNKNLAGRYANTYKNWFPGPMGRTQGWNLGSGVNRASVSAFATTNRMELEGASYQVPPQPNGMTNNLQGSNTYALENTMIFNSQPANPGTTATYLEGNMLITSESETQPVNRVAYNVGGQMATNNQSSTTAPATGTYNLQEIVPGSVWMERDVYLQGPIWAKIPETGAHFHPSPAMGGFGLKHPPPMMLIKNTPVPGNITSFSDVPVSSFITQYSTGQVTVEMEWELKKENSKRWNPEIQYTNNYCDPQFVDFAPDSTGEYRTTRPIGTRYLTRPL

SEQ ID NO: 238 - protein, 724 aa, synthetic construct
MSFVDHPPDWLEEVGEGLREFLGLEAGPPKPKPNQQHQDQARGLVLPGYNYLGPGNGLDRGEPVNRADEVAREHDISYNEQLEAGDNPYLKYNHADAEFQEKLADDTSFGGNLGKAVFQAKKRVLEPFGLVEEGAKTAPTGKRIDDHFPKRKKARTEEDSKPSTSSDAEAGPSGSQQLQIPAQPASSLGADTMSAGGGGPLGDNNQGADGVGNASGDWHCDSTWMGDRVVTKSTRTWVLPSYNNHQYREIKSGSVDGSNANAYFGYSTPWGYFDFNRFHSHWSPRDWQRLINNYWGFRPRSLRVKIFNIQVKEVTVQDSTTTIANNLTSTVQVFTDDDYQLPYVVGNGTEGCLPAFPPQVFTLPQYGYATLNRDNTENPTERSSFFCLEYFPSKMLRTGNNFEFTYNFEEVPFHSSFAPSQNLFKLANPLVDQYLYRFVSTNNTGGVQFNKNLAGRYANTYKNWFPGPMGRTQGWNLGSGVNRASVIAFARTNRMELEGASYQVPPQPNGMTNNLQGSNTYALENTMIFNSQPANPGTTATYLEGNMLITSESETQPVNRVAYNVGGQMATNNQSSTTAPATGTYNLQEIVPGSVWMERDVYLQGPIWAKIPETGAHFHPSPAMGGFGLKHPPPMMLIKNTPVPGNITSFSDVPVSSFITQYSTGQVTVEMEWELKKENSKRWNPEIQYTNNYNDPQFVDFAPDSTGEYRTTRPIGTRYLTRPL

SEQ ID NO: 239 - protein, 724 aa, synthetic construct
MSFVDHPPDWLEEVGEGLREFLGLEAGPPKPKPNQQHQDQARGLVLPGYNYLGPGNGLDRGEPVNRADEVAREHDISYNEQLEAGDNPYLKYNHADAEFQEKLADDTSFGGNLGKAVFQAKKRVLEPFGLVEEGAKTAPTGKRIDDHFPKRKKARTEEDSKPSTSSDAEAGPSGSQQLQIPAQPASSLGADTMSAGGGGPLGDNNQGADGVGNASGDWHCDSTWMGDRVVTKSTRTWVLPSYNNHQYREIKSGSVDGSNANAYFGYSTPWGYFDFNRFHSHWSPRDWQRLINNYWGFRPRSLRVKIFNIQVKEVTVQDSTTTIANNLTSTVQVFTDDDYQLPYVVGNGTEGCLPAFPPQVFTLPQYGYATLNRDNTENPTERSSFFCLEYFPSKMLRTGNNFEFTYNFEEVPFHSSFAPSQNLFKLANPLVDQYLYRFVSTNNTGGVQFNKNLAGRYANTYKNWFPGPMGRTQGWNLGSGVNRASVIAFATTNRMELEGASYQVPPQPNGMTNNLQGSNTYALENTMIFNSQPANPGTTATYLEGNMLITSESETQPVNRVAYNVGGQMATNNQSSTTAPATGTYNLQEIVPGSVWMERDVYLQGPIWAKIPETGAHFHPSPAMGGFGLKHPPPMMLIKNTPVPGNITSFSDVPVSSFITQYSTGQVTVEMEWELKKENSKRWNPEIQYTNNYCDPQFVDFAPDSTGEYRTTRPIGTRYLTRPL

SEQ ID NO: 240 - protein, 724 aa, synthetic construct
MSFVDHPPDWLEEVGEGLREFLGLEAGPPKPKPNQQHQDQARGLVLPGYNYLGPGNGLDRGEPVNRADEVAREHDISYNEQLEAGDNPYLKYNHADAEFQEKLADDTSFGGNLGKAVFQAKKRVLEPFGLVEEGAKTAPTGKRIDDHFPKRKKARTEEDSKPSTSSDAEAGPSGSQQLQIPAQPASSLGADTMSAGGGGPLGDNNQGADGVGNASGDWHCDSTWMGDRVVTKSTRTWVLPSYNNHQYREIKSGSVDGSNANAYFGYSTPWGYFDFNRFHSHWSPRDWQRLINNYWGFRPRSLRVKIFNIQVKEVTVQDSTTTIANNLTSTVQVFTDDDYQLPYVVGNGTEGCLPAFPPQVFTLPQYGYATLNRDNTENPTERSSFFCLEYFPSKMLRTGNNFEFTYNFEEVPFHSSFAPSQNLFKLANPLVDQYLYRFVSTNNTGGVQFNKNLAGRYANTYKNWFPGPMGRTQGWNLGSGVNRASVSAFARTNRMELEGASYQVPPQPNGMTNNLQGSNTYALENTMIFNSQPANPGTTATYLEGNMLITSESETQPVNRVAYNVGGQMATNNQSSTTAPATGTYNLQEIVPGSVWMERDVYLQGPIWAKIPETGAHFHPSPAMGGFGLKHPPPMMLIKNTPVPGNITSFSDVPVSSFITQYSTGQVTVEMEWELKKENSKRWNPEIQYTNNYCDPQFVDFAPDSTGEYRTTRPIGTRYLTRPL

SEQ ID NO: 241 - protein, 724 aa, synthetic construct
MSFVDHPPDWLEEVGEGLREFLGLEAGPPKPKPNQQHQDQARGLVLPGYNYLGPGNGLDRGEPVNRADEVAREHDISYNEQLEAGDNPYLKYNHADAEFQEKLADDTSFGGNLGKAVFQAKKRVLEPFGLVEEGAKTAPTGKRIDDHFPKRKKARTEEDSKPSTSSDAEAGPSGSQQLQIPAQPASSLGADTMSAGGGGPLGDNNQGADGVGNASGDWHCDSTWMGDRVVTKSTRTWVLPSYNNHQYREIKSGSVDGSNANAYFGYSTPWGYFDFNRFHSHWSPRDWQRLINNYWGFRPRSLRVKIFNIQVKEVTVQDSTTTIANNLTSTVQVFTDDDYQLPYVVGNGTEGCLPAFPPQVFTLPQYGYATLNRDNTENPTERSSFFCLEYFPSKMLRTGNNFEFTYNFEEVPFHSSFAPSQNLFKLANPLVDQYLYRFVSTNNTGGVQFNKNLAGRYANTYKNWFPGPMGRTQGWNLGSGVNRASVIAFARTNRMELEGASYQVPPQPNGMTNNLQGSNTYALENTMIFNSQPANPGTTATYLEGNMLITSESETQPVNRVAYNVGGQMATNNQSSTTAPATGTYNLQEIVPGSVWMERDVYLQGPIWAKIPETGAHFHPSPAMGGFGLKHPPPMMLIKNTPVPGNITSFSDVPVSSFITQYSTGQVTVEMEWELKKENSKRWNPEIQYTNNYCDPQFVDFAPDSTGEYRTTRPIGTRYLTRPL

SEQ ID NO: 242 - protein, 724 aa, synthetic construct
MSFVDHPPDWLEEVGEGLREFLGLEAGPPKPKPNQQHQDQARGLVLPGYNYLGPGNGLDRGEPVNRADEVAREHDISYNEQLEAGDNPYLKYNHADAEFQEKLADDTSFGGNLGKAVFQAKKRVLEPFGLVEEGAKTAPTGKRIDDHFPKRKKARTEEDSKPSTSSDAEAGPSGSQQLQIPAQPASSLGADTMSAGGGGPLGDNNQGADGVGNASGDWHCDSTWMGDRVVTKSTRTWVLPSYNNHQYREIKSGSVDGSNANAYFGYSTPWGYFDFNRFHSHWSPRDWQRLINNYWGFRPRSLRVKIFNIQVKEVTVQDSTTTIANNLTSTVQVFADDDYQLPYVVGNGTEGCLPAFPPQVFTLPQYGYATLNRDNTENPTERSSFFCLEYFPSKMLRTGNNFEFTYNFEEVPFHSSFAPSQNLFKLANPLVDQYLYRFVSTNNTGGVQFNKNLAGRYANTYKNWFPGPMGRTQGWNLGSGVNRASVSAFATTNRMELEGASYQVPPQPNGMTNNLQGSNTYALENTMIFNSQPANPGTTATYLEGNMLITSESETQPVNRVAYNVGGQMATNNQSSTTAPATGTYNLQEIVPGSVWMERDVYLQGPIWAKIPETGAHFHPSPAMGGFGLKHPPPMMLIKNTPVPGNITSFSDVPVSSFITQYSTGQVTVEMEWELKKENSKRWNPEIQYTNNYNDPQFVDFAPDSTGEYRTTRPIGTRYLTRPL

SEQ ID NO: 243 - protein, 724 aa, synthetic construct
MSFVDHPPDWLEEVGEGLREFLGLEAGPPKPKPNQQHQDQARGLVLPGYNYLGPGNGLDRGEPVNRADEVAREHDISYNEQLEAGDNPYLKYNHADAEFQEKLADDTSFGGNLGKAVFQAKKRVLEPFGLVEEGAKTAPTGKRIDDHFPKRKKARTEEDSKPSTSSDAEAGPSGSQQLQIPAQPASSLGADTMSAGGGGPLGDNNQGADGVGNASGDWHCDSTWMGDRVVTKSTRTWVLPSYNNHQYREIKSGSVDGSNANAYFGYSTPWGYFDFNRFHSHWSPRDWQRLINNYWGFRPRSLRVKIFNIQVKEVTVQDSTTTIANNLTSTVQVFADDDYQLPYVVGNGTEGCLPAFPPQVFTLPQYGYATLNRDNTENPTERSSFFCLEYFPSKMLRTGNNFEFTYNFEEVPFHSSFAPSQNLFKLANPLVDQYLYRFVSTNNTGGVQFNKNLAGRYANTYKNWFPGPMGRTQGWNLGSGVNRASVIAFATTNRMELEGASYQVPPQPNGMTNNLQGSNTYALENTMIFNSQPANPGTTATYLEGNMLITSESETQPVNRVAYNVGGQMATNNQSSTTAPATGTYNLQEIVPGSVWMERDVYLQGPIWAKIPETGAHFHPSPAMGGFGLKHPPPMMLIKNTPVPGNITSFSDVPVSSFITQYSTGQVTVEMEWELKKENSKRWNPEIQYTNNYNDPQFVDFAPDSTGEYRTTRPIGTRYLTRPL

SEQ ID NO: 244 - protein, 724 aa, synthetic construct
MSFVDHPPDWLEEVGEGLREFLGLEAGPPKPKPNQQHQDQARGLVLPGYNYLGPGNGLDRGEPVNRADEVAREHDISYNEQLEAGDNPYLKYNHADAEFQEKLADDTSFGGNLGKAVFQAKKRVLEPFGLVEEGAKTAPTGKRIDDHFPKRKKARTEEDSKPSTSSDAEAGPSGSQQLQIPAQPASSLGADTMSAGGGGPLGDNNQGADGVGNASGDWHCDSTWMGDRVVTKSTRTWVLPSYNNHQYREIKSGSVDGSNANAYFGYSTPWGYFDFNRFHSHWSPRDWQRLINNYWGFRPRSLRVKIFNIQVKEVTVQDSTTTIANNLTSTVQVFADDDYQLPYVVGNGTEGCLPAFPPQVFTLPQYGYATLNRDNTENPTERSSFFCLEYFPSKMLRTGNNFEFTYNFEEVPFHSSFAPSQNLFKLANPLVDQYLYRFVSTNNTGGVQFNKNLAGRYANTYKNWFPGPMGRTQGWNLGSGVNRASVSAFARTNRMELEGASYQVPPQPNGMTNNLQGSNTYALENTMIFNSQPANPGTTATYLEGNMLITSESETQPVNRVAYNVGGQMATNNQSSTTAPATGTYNLQEIVPGSVWMERDVYLQGPIWAKIPETGAHFHPSPAMGGFGLKHPPPMMLIKNTPVPGNITSFSDVPVSSFITQYSTGQVTVEMEWELKKENSKRWNPEIQYTNNYNDPQFVDFAPDSTGEYRTTRPIGTRYLTRPL

SEQ ID NO: 245 - protein, 724 aa, synthetic construct
MSFVDHPPDWLEEVGEGLREFLGLEAGPPKPKPNQQHQDQARGLVLPGYNYLGPGNGLDRGEPVNRADEVAREHDISYNEQLEAGDNPYLKYNHADAEFQEKLADDTSFGGNLGKAVFQAKKRVLEPFGLVEEGAKTAPTGKRIDDHFPKRKKARTEEDSKPSTSSDAEAGPSGSQQLQIPAQPASSLGADTMSAGGGGPLGDNNQGADGVGNASGDWHCDSTWMGDRVVTKSTRTWVLPSYNNHQYREIKSGSVDGSNANAYFGYSTPWGYFDFNRFHSHWSPRDWQRLINNYWGFRPRSLRVKIFNIQVKEVTVQDSTTTIANNLTSTVQVFADDDYQLPYVVGNGTEGCLPAFPPQVFTLPQYGYATLNRDNTENPTERSSFFCLEYFPSKMLRTGNNFEFTYNFEEVPFHSSFAPSQNLFKLANPLVDQYLYRFVSTNNTGGVQFNKNLAGRYANTYKNWFPGPMGRTQGWNLGSGVNRASVSAFATTNRMELEGASYQVPPQPNGMTNNLQGSNTYALENTMIFNSQPANPGTTATYLEGNMLITSESETQPVNRVAYNVGGQMATNNQSSTTAPATGTYNLQEIVPGSVWMERDVYLQGPIWAKIPETGAHFHPSPAMGGFGLKHPPPMMLIKNTPVPGNITSFSDVPVSSFITQYSTGQVTVEMEWELKKENSKRWNPEIQYTNNYCDPQFVDFAPDSTGEYRTTRPIGTRYLTRPL

SEQ ID NO: 246 - protein, 724 aa, synthetic construct
MSFVDHPPDWLEEVGEGLREFLGLEAGPPKPKPNQQHQDQARGLVLPGYNYLGPGNGLDRGEPVNRADEVAREHDISYNEQLEAGDNPYLKYNHADAEFQEKLADDTSFGGNLGKAVFQAKKRVLEPFGLVEEGAKTAPTGKRIDDHFPKRKKARTEEDSKPSTSSDAEAGPSGSQQLQIPAQPASSLGADTMSAGGGGPLGDNNQGADGVGNASGDWHCDSTWMGDRVVTKSTRTWVLPSYNNHQYREIKSGSVDGSNANAYFGYSTPWGYFDFNRFHSHWSPRDWQRLINNYWGFRPRSLRVKIFNIQVKEVTVQDSTTTIANNLTSTVQVFADDDYQLPYVVGNGTEGCLPAFPPQVFTLPQYGYATLNRDNTENPTERSSFFCLEYFPSKMLRTGNNFEFTYNFEEVPFHSSFAPSQNLFKLANPLVDQYLYRFVSTNNTGGVQFNKNLAGRYANTYKNWFPGPMGRTQGWNLGSGVNRASVIAFARTNRMELEGASYQVPPQPNGMTNNLQGSNTYALENTMIFNSQPANPGTTATYLEGNMLITSESETQPVNRVAYNVGGQMATNNQSSTTAPATGTYNLQEIVPGSVWMERDVYLQGPIWAKIPETGAHFHPSPAMGGFGLKHPPPMMLIKNTPVPGNITSFSDVPVSSFITQYSTGQVTVEMEWELKKENSKRWNPEIQYTNNYNDPQFVDFAPDSTGEYRTTRPIGTRYLTRPL

SEQ ID NO: 247 - protein, 724 aa, synthetic construct
MSFVDHPPDWLEEVGEGLREFLGLEAGPPKPKPNQQHQDQARGLVLPGYNYLGPGNGLDRGEPVNRADEVAREHDISYNEQLEAGDNPYLKYNHADAEFQEKLADDTSFGGNLGKAVFQAKKRVLEPFGLVEEGAKTAPTGKRIDDHFPKRKKARTEEDSKPSTSSDAEAGPSGSQQLQIPAQPASSLGADTMSAGGGGPLGDNNQGADGVGNASGDWHCDSTWMGDRVVTKSTRTWVLPSYNNHQYREIKSGSVDGSNANAYFGYSTPWGYFDFNRFHSHWSPRDWQRLINNYWGFRPRSLRVKIFNIQVKEVTVQDSTTTIANNLTSTVQVFADDDYQLPYVVGNGTEGCLPAFPPQVFTLPQYGYATLNRDNTENPTERSSFFCLEYFPSKMLRTGNNFEFTYNFEEVPFHSSFAPSQNLFKLANPLVDQYLYRFVSTNNTGGVQFNKNLAGRYANTYKNWFPGPMGRTQGWNLGSGVNRASVIAFATTNRMELEGASYQVPPQPNGMTNNLQGSNTYALENTMIFNSQPANPGTTATYLEGNMLITSESETQPVNRVAYNVGGQMATNNQSSTTAPATGTYNLQEIVPGSVWMERDVYLQGPIWAKIPETGAHFHPSPAMGGFGLKHPPPMMLIKNTPVPGNITSFSDVPVSSFITQYSTGQVTVEMEWELKKENSKRWNPEIQYTNNYCDPQFVDFAPDSTGEYRTTRPIGTRYLTRPL

SEQ ID NO: 248 - protein, 724 aa, synthetic construct
MSFVDHPPDWLEEVGEGLREFLGLEAGPPKPKPNQQHQDQARGLVLPGYNYLGPGNGLDRGEPVNRADEVAREHDISYNEQLEAGDNPYLKYNHADAEFQEKLADDTSFGGNLGKAVFQAKKRVLEPFGLVEEGAKTAPTGKRIDDHFPKRKKARTEEDSKPSTSSDAEAGPSGSQQLQIPAQPASSLGADTMSAGGGGPLGDNNQGADGVGNASGDWHCDSTWMGDRVVTKSTRTWVLPSYNNHQYREIKSGSVDGSNANAYFGYSTPWGYFDFNRFHSHWSPRDWQRLINNYWGFRPRSLRVKIFNIQVKEVTVQDSTTTIANNLTSTVQVFADDDYQLPYVVGNGTEGCLPAFPPQVFTLPQYGYATLNRDNTENPTERSSFFCLEYFPSKMLRTGNNFEFTYNFEEVPFHSSFAPSQNLFKLANPLVDQYLYRFVSTNNTGGVQFNKNLAGRYANTYKNWFPGPMGRTQGWNLGSGVNRASVSAFARTNRMELEGASYQVPPQPNGMTNNLQGSNTYALENTMIFNSQPANPGTTATYLEGNMLITSESETQPVNRVAYNVGGQMATNNQSSTTAPATGTYNLQEIVPGSVWMERDVYLQGPIWAKIPETGAHFHPSPAMGGFGLKHPPPMMLIKNTPVPGNITSFSDVPVSSFITQYSTGQVTVEMEWELKKENSKRWNPEIQYTNNYCDPQFVDFAPDSTGEYRTTRPIGTRYLTRPL

SEQ ID NO: 249 - protein, 724 aa, synthetic construct
MSFVDHPPDWLEEVGEGLREFLGLEAGPPKPKPNQQHQDQARGLVLPGYNYLGPGNGLDRGEPVNRADEVAREHDISYNEQLEAGDNPYLKYNHADAEFQEKLADDTSFGGNLGKAVFQAKKRVLEPFGLVEEGAKTAPTGKRIDDHFPKRKKARTEEDSKPSTSSDAEAGPSGSQQLQIPAQPASSLGADTMSAGGGGPLGDNNQGADGVGNASGDWHCDSTWMGDRVVTKSTRTWVLPSYNNHQYREIKSGSVDGSNANAYFGYSTPWGYFDFNRFHSHWSPRDWQRLINNYWGFRPRSLRVKIFNIQVKEVTVQDSTTTIANNLTSTVQVFADDDYQLPYVVGNGTEGCLPAFPPQVFTLPQYGYATLNRDNTENPTERSSFFCLEYFPSKMLRTGNNFEFTYNFEEVPFHSSFAPSQNLFKLANPLVDQYLYRFVSTNNTGGVQFNKNLAGRYANTYKNWFPGPMGRTQGWNLGSGVNRASVIAFARTNRMELEGASYQVPPQPNGMTNNLQGSNTYALENTMIFNSQPANPGTTATYLEGNMLITSESETQPVNRVAYNVGGQMATNNQSSTTAPATGTYNLQEIVPGSVWMERDVYLQGPIWAKIPETGAHFHPSPAMGGFGLKHPPPMMLIKNTPVPGNITSFSDVPVSSFITQYSTGQVTVEMEWELKKENSKRWNPEIQYTNNYCDPQFVDFAPDSTGEYRTTRPIGTRYLTRPL

SEQ ID NO: 250 - protein, 736 aa, synthetic construct
MAADGYLPDWLEDNLSEGIREWWDLKPGAPKPKANQQKQDDGRGLVLPGYKYLGPFNGLDKGEPVNAADAAALEHDKAYDQQLKAGDNPYLRYNHADAEFQERLQEDTSFGGNLGRAVFQAKKRVLEPFGLVEEGAKTAPGKKRPVEQSPQEPDSSSGIGKTGQQPAKKRLNFGQTGDSESVPDPQPLGEPPATPAAVGPTTMASGGGAPMADNNEGADGVGNASGNWHCDSTWLGDRVITTSTRTWALPTYNNHLYKQISSASTGASNDNHYFGYSTPWGYFDFNRFHCHFSPRDWQRLINNNWGFRPKRLNFKLFNIQVKEVTTNDGVTTIANNLTSTVQVFSDSEYQLPYVLGSAHQGCLPPFPADVFMIPQYGYLTLNNGSQAVGRSSFYCLEYFPSQMLRTGNNFTFSYTFEDVPFHSSYAHSQSLDRLMNPLIDQYLYYLNRTQNQSGSAQNKDLLFSRGSPAGMSVQPKNWLPGPCYRQQRVSKTKTDNNNSNITWTGASKYNLNGRESIINPGTAMASHKDDKDKFFPMSGVMIFGKESAGASNTALDNVMITDEEEIKATNPVATERFGTVAVNLQSSSTDPATGDVHVMGALPGMVWQDRDVYLQGPIWAKIPHTDGHFHPSPLMGGFGLKHPPPQILIKNTPVPANPPAEFSATKFASFITQYSTGQVSVEIEWELQKENSKRWNPEVQYTSNYAKSANVDFTVDNNGLYTEPRPIGTRYLTRPL

SEQ ID NO: 251 - protein, 736 aa, synthetic construct
MAADGYLPDWLEDNLSEGIREWWDLKPGAPKPKANQQKQDDGRGLVLPGYKYLGPFNGLDKGEPVNAADAAALEHDKAYDQQLKAGDNPYLRYNHADAEFQERLQEDTSFGGNLGRAVFQAKKRVLEPFGLVEEGAKTAPGKKRPVEQSPQEPDSSSGIGKTGQQPAKKRLNFGQTGDSESVPDPQPLGEPPATPAAVGPTTMASGGGAPMADNNEGADGVGNASGNWHCDSTWLGDRVITTSTRTWALPTYNNHLYKQISSASTGASNDNHYFGYSTPWGYFDFNRFHCHFSPRDWQRLINNNWGFRPKRLNFKLFNIQVKEVTTNDGVTTIANNLTSTVQVFSDSEYQLPYVLGSAHQGCLPPFPADVFMIPQYGYLTLNNGSQAVGRSSFYCLEYFPSQMLRTGNNFTFSYTFEDVPFHSSYAHSQSLDRLMNPLIDQYLYYLNRTQNQSGSAQNKDLLFSRGSPAGMSVQPKNWLPGPCYRQQRVSKTKTDNNNSNFTWTRASKYNLNGRESIINPGTAMASHKDDKDKFFPMSGVMIFGKESAGASNTALDNVMITDEEEIKATNPVATERFGTVAVNLQSSSTDPATGDVHVMGALPGMVWQDRDVYLQGPIWAKIPHTDGHFHPSPLMGGFGLKHPPPQILIKNTPVPANPPAEFSATKFASFITQYSTGQVSVEIEWELQKENSKRWNPEVQYTSNYAKSANVDFTVDNNGLYTEPRPIGTRYLTRPL

SEQ ID NO: 252 - protein, 736 aa, synthetic construct
MAADGYLPDWLEDNLSEGIREWWDLKPGAPKPKANQQKQDDGRGLVLPGYKYLGPFNGLDKGEPVNAADAAALEHDKAYDQQLKAGDNPYLRYNHADAEFQERLQEDTSFGGNLGRAVFQAKKRVLEPFGLVEEGAKTAPGKKRPVEQSPQEPDSSSGIGKTGQQPAKKRLNFGQTGDSESVPDPQPLGEPPATPAAVGPTTMASGGGAPMADNNEGADGVGNASGNWHCDSTWLGDRVITTSTRTWALPTYNNHLYKQISSASTGASNDNHYFGYSTPWGYFDFNRFHCHFSPRDWQRLINNNWGFRPKRLNFKLFNIQVKEVTTNDGVTTIANNLTSTVQVFSDSEYQLPYVLGSAHQGCLPPFPADVFMIPQYGYLTLNNGSQAVGRSSFYCLEYFPSQMLRTGNNFTFSYTFEDVPFHSSYAHSQSLDRLMNPLIDQYLYYLNRTQNQSGSAQNKDLLFSRGSPAGMSVQPKNWLPGPCYRQQRVSKTKTDNNNSNFTWTGASKYNLNGRESIINPGTAMASHKDDKDKFFPMSGVMIFGKESAGASNTALDNVMITDEEEIKATNPVATERFGTVAVNLQSSSTDPATGDVHVMGALPGMVWQDRDVYLQGPIWAKIPHTDGHFHPSPLMGGFGLKHPPPQILIKNTPVPANPPAEFSATKFASFITQYSTGQVSVEIEWELQKENSKRWNPEVQYTSNYCKSANVDFTVDNNGLYTEPRPIGTRYLTRPL

SEQ ID NO: 253 - protein, 736 aa, synthetic construct
MAADGYLPDWLEDNLSEGIREWWDLKPGAPKPKANQQKQDDGRGLVLPGYKYLGPFNGLDKGEPVNAADAAALEHDKAYDQQLKAGDNPYLRYNHADAEFQERLQEDTSFGGNLGRAVFQAKKRVLEPFGLVEEGAKTAPGKKRPVEQSPQEPDSSSGIGKTGQQPAKKRLNFGQTGDSESVPDPQPLGEPPATPAAVGPTTMASGGGAPMADNNEGADGVGNASGNWHCDSTWLGDRVITTSTRTWALPTYNNHLYKQISSASTGASNDNHYFGYSTPWGYFDFNRFHCHFSPRDWQRLINNNWGFRPKRLNFKLFNIQVKEVTTNDGVTTIANNLTSTVQVFSDSEYQLPYVLGSAHQGCLPPFPADVFMIPQYGYLTLNNGSQAVGRSSFYCLEYFPSQMLRTGNNFTFSYTFEDVPFHSSYAHSQSLDRLMNPLIDQYLYYLNRTQNQSGSAQNKDLLFSRGSPAGMSVQPKNWLPGPCYRQQRVSKTKTDNNNSNITWTRASKYNLNGRESIINPGTAMASHKDDKDKFFPMSGVMIFGKESAGASNTALDNVMITDEEEIKATNPVATERFGTVAVNLQSSSTDPATGDVHVMGALPGMVWQDRDVYLQGPIWAKIPHTDGHFHPSPLMGGFGLKHPPPQILIKNTPVPANPPAEFSATKFASFITQYSTGQVSVEIEWELQKENSKRWNPEVQYTSNYAKSANVDFTVDNNGLYTEPRPIGTRYLTRPL

SEQ ID NO: 254 - protein, 736 aa, synthetic construct
MAADGYLPDWLEDNLSEGIREWWDLKPGAPKPKANQQKQDDGRGLVLPGYKYLGPFNGLDKGEPVNAADAAALEHDKAYDQQLKAGDNPYLRYNHADAEFQERLQEDTSFGGNLGRAVFQAKKRVLEPFGLVEEGAKTAPGKKRPVEQSPQEPDSSSGIGKTGQQPAKKRLNFGQTGDSESVPDPQPLGEPPATPAAVGPTTMASGGGAPMADNNEGADGVGNASGNWHCDSTWLGDRVITTSTRTWALPTYNNHLYKQISSASTGASNDNHYFGYSTPWGYFDFNRFHCHFSPRDWQRLINNNWGFRPKRLNFKLFNIQVKEVTTNDGVTTIANNLTSTVQVFSDSEYQLPYVLGSAHQGCLPPFPADVFMIPQYGYLTLNNGSQAVGRSSFYCLEYFPSQMLRTGNNFTFSYTFEDVPFHSSYAHSQSLDRLMNPLIDQYLYYLNRTQNQSGSAQNKDLLFSRGSPAGMSVQPKNWLPGPCYRQQRVSKTKTDNNNSNITWTGASKYNLNGRESIINPGTAMASHKDDKDKFFPMSGVMIFGKESAGASNTALDNVMITDEEEIKATNPVATERFGTVAVNLQSSSTDPATGDVHVMGALPGMVWQDRDVYLQGPIWAKIPHTDGHFHPSPLMGGFGLKHPPPQILIKNTPVPANPPAEFSATKFASFITQYSTGQVSVEIEWELQKENSKRWNPEVQYTSNYCKSANVDFTVDNNGLYTEPRPIGTRYLTRPL

SEQ ID NO: 255 - protein, 736 aa, synthetic construct
MAADGYLPDWLEDNLSEGIREWWDLKPGAPKPKANQQKQDDGRGLVLPGYKYLGPFNGLDKGEPVNAADAAALEHDKAYDQQLKAGDNPYLRYNHADAEFQERLQEDTSFGGNLGRAVFQAKKRVLEPFGLVEEGAKTAPGKKRPVEQSPQEPDSSSGIGKTGQQPAKKRLNFGQTGDSESVPDPQPLGEPPATPAAVGPTTMASGGGAPMADNNEGADGVGNASGNWHCDSTWLGDRVITTSTRTWALPTYNNHLYKQISSASTGASNDNHYFGYSTPWGYFDFNRFHCHFSPRDWQRLINNNWGFRPKRLNFKLFNIQVKEVTTNDGVTTIANNLTSTVQVFSDSEYQLPYVLGSAHQGCLPPFPADVFMIPQYGYLTLNNGSQAVGRSSFYCLEYFPSQMLRTGNNFTFSYTFEDVPFHSSYAHSQSLDRLMNPLIDQYLYYLNRTQNQSGSAQNKDLLFSRGSPAGMSVQPKNWLPGPCYRQQRVSKTKTDNNNSNFTWTRASKYNLNGRESIINPGTAMASHKDDKDKFFPMSGVMIFGKESAGASNTALDNVMITDEEEIKATNPVATERFGTVAVNLQSSSTDPATGDVHVMGALPGMVWQDRDVYLQGPIWAKIPHTDGHFHPSPLMGGFGLKHPPPQILIKNTPVPANPPAEFSATKFASFITQYSTGQVSVEIEWELQKENSKRWNPEVQYTSNYCKSANVDFTVDNNGLYTEPRPIGTRYLTRPL

SEQ ID NO: 256 - protein, 736 aa, synthetic construct
MAADGYLPDWLEDNLSEGIREWWDLKPGAPKPKANQQKQDDGRGLVLPGYKYLGPFNGLDKGEPVNAADAAALEHDKAYDQQLKAGDNPYLRYNHADAEFQERLQEDTSFGGNLGRAVFQAKKRVLEPFGLVEEGAKTAPGKKRPVEQSPQEPDSSSGIGKTGQQPAKKRLNFGQTGDSESVPDPQPLGEPPATPAAVGPTTMASGGGAPMADNNEGADGVGNASGNWHCDSTWLGDRVITTSTRTWALPTYNNHLYKQISSASTGASNDNHYFGYSTPWGYFDFNRFHCHFSPRDWQRLINNNWGFRPKRLNFKLFNIQVKEVTTNDGVTTIANNLTSTVQVFSDSEYQLPYVLGSAHQGCLPPFPADVFMIPQYGYLTLNNGSQAVGRSSFYCLEYFPSQMLRTGNNFTFSYTFEDVPFHSSYAHSQSLDRLMNPLIDQYLYYLNRTQNQSGSAQNKDLLFSRGSPAGMSVQPKNWLPGPCYRQQRVSKTKTDNNNSNITWTRASKYNLNGRESIINPGTAMASHKDDKDKFFPMSGVMIFGKESAGASNTALDNVMITDEEEIKATNPVATERFGTVAVNLQSSSTDPATGDVHVMGALPGMVWQDRDVYLQGPIWAKIPHTDGHFHPSPLMGGFGLKHPPPQILIKNTPVPANPPAEFSATKFASFITQYSTGQVSVEIEWELQKENSKRWNPEVQYTSNYCKSANVDFTVDNNGLYTEPRPIGTRYLTRPL

SEQ ID NO: 257 - protein, 736 aa, synthetic construct
MAADGYLPDWLEDNLSEGIREWWDLKPGAPKPKANQQKQDDGRGLVLPGYKYLGPFNGLDKGEPVNAADAAALEHDKAYDQQLKAGDNPYLRYNHADAEFQERLQEDTSFGGNLGRAVFQAKKRVLEPFGLVEEGAKTAPGKKRPVEQSPQEPDSSSGIGKTGQQPAKKRLNFGQTGDSESVPDPQPLGEPPATPAAVGPTTMASGGGAPMADNNEGADGVGNASGNWHCDSTWLGDRVITTSTRTWALPTYNNHLYKQISSASTGASNDNHYFGYSTPWGYFDFNRFHCHFSPRDWQRLINNNWGFRPKRLNFKLFNIQVKEVTTNDGVTTIANNLTSTVQVFADSEYQLPYVLGSAHQGCLPPFPADVFMIPQYGYLTLNNGSQAVGRSSFYCLEYFPSQMLRTGNNFTFSYTFEDVPFHSSYAHSQSLDRLMNPLIDQYLYYLNRTQNQSGSAQNKDLLFSRGSPAGMSVQPKNWLPGPCYRQQRVSKTKTDNNNSNFTWTGASKYNLNGRESIINPGTAMASHKDDKDKFFPMSGVMIFGKESAGASNTALDNVMITDEEEIKATNPVATERFGTVAVNLQSSSTDPATGDVHVMGALPGMVWQDRDVYLQGPIWAKIPHTDGHFHPSPLMGGFGLKHPPPQILIKNTPVPANPPAEFSATKFASFITQYSTGQVSVEIEWELQKENSKRWNPEVQYTSNYAKSANVDFTVDNNGLYTEPRPIGTRYLTRPL

SEQ ID NO: 258 - protein, 736 aa, synthetic construct
MAADGYLPDWLEDNLSEGIREWWDLKPGAPKPKANQQKQDDGRGLVLPGYKYLGPFNGLDKGEPVNAADAAALEHDKAYDQQLKAGDNPYLRYNHADAEFQERLQEDTSFGGNLGRAVFQAKKRVLEPFGLVEEGAKTAPGKKRPVEQSPQEPDSSSGIGKTGQQPAKKRLNFGQTGDSESVPDPQPLGEPPATPAAVGPTTMASGGGAPMADNNEGADGVGNASGNWHCDSTWLGDRVITTSTRTWALPTYNNHLYKQISSASTGASNDNHYFGYSTPWGYFDFNRFHCHFSPRDWQRLINNNWGFRPKRLNFKLFNIQVKEVTTNDGVTTIANNLTSTVQVFADSEYQLPYVLGSAHQGCLPPFPADVFMIPQYGYLTLNNGSQAVGRSSFYCLEYFPSQMLRTGNNFTFSYTFEDVPFHSSYAHSQSLDRLMNPLIDQYLYYLNRTQNQSGSAQNKDLLFSRGSPAGMSVQPKNWLPGPCYRQQRVSKTKTDNNNSNITWTGASKYNLNGRESIINPGTAMASHKDDKDKFFPMSGVMIFGKESAGASNTALDNVMITDEEEIKATNPVATERFGTVAVNLQSSSTDPATGDVHVMGALPGMVWQDRDVYLQGPIWAKIPHTDGHFHPSPLMGGFGLKHPPPQILIKNTPVPANPPAEFSATKFASFITQYSTGQVSVEIEWELQKENSKRWNPEVQYTSNYAKSANVDFTVDNNGLYTEPRPIGTRYLTRPL

SEQ ID NO: 259 - protein, 736 aa, synthetic construct
MAADGYLPDWLEDNLSEGIREWWDLKPGAPKPKANQQKQDDGRGLVLPGYKYLGPFNGLDKGEPVNAADAAALEHDKAYDQQLKAGDNPYLRYNHADAEFQERLQEDTSFGGNLGRAVFQAKKRVLEPFGLVEEGAKTAPGKKRPVEQSPQEPDSSSGIGKTGQQPAKKRLNFGQTGDSESVPDPQPLGEPPATPAAVGPTTMASGGGAPMADNNEGADGVGNASGNWHCDSTWLGDRVITTSTRTWALPTYNNHLYKQISSASTGASNDNHYFGYSTPWGYFDFNRFHCHFSPRDWQRLINNNWGFRPKRLNFKLFNIQVKEVTTNDGVTTIANNLTSTVQVFADSEYQLPYVLGSAHQGCLPPFPADVFMIPQYGYLTLNNGSQAVGRSSFYCLEYFPSQMLRTGNNFTFSYTFEDVPFHSSYAHSQSLDRLMNPLIDQYLYYLNRTQNQSGSAQNKDLLFSRGSPAGMSVQPKNWLPGPCYRQQRVSKTKTDNNNSNFTWTRASKYNLNGRESIINPGTAMASHKDDKDKFFPMSGVMIFGKESAGASNTALDNVMITDEEEIKATNPVATERFGTVAVNLQSSSTDPATGDVHVMGALPGMVWQDRDVYLQGPIWAKIPHTDGHFHPSPLMGGFGLKHPPPQILIKNTPVPANPPAEFSATKFASFITQYSTGQVSVEIEWELQKENSKRWNPEVQYTSNYAKSANVDFTVDNNGLYTEPRPIGTRYLTRPL

SEQ ID NO: 260 - protein, 736 aa, synthetic construct
MAADGYLPDWLEDNLSEGIREWWDLKPGAPKPKANQQKQDDGRGLVLPGYKYLGPFNGLDKGEPVNAADAAALEHDKAYDQQLKAGDNPYLRYNHADAEFQERLQEDTSFGGNLGRAVFQAKKRVLEPFGLVEEGAKTAPGKKRPVEQSPQEPDSSSGIGKTGQQPAKKRLNFGQTGDSESVPDPQPLGEPPATPAAVGPTTMASGGGAPMADNNEGADGVGNASGNWHCDSTWLGDRVITTSTRTWALPTYNNHLYKQISSASTGASNDNHYFGYSTPWGYFDFNRFHCHFSPRDWQRLINNNWGFRPKRLNFKLFNIQVKEVTTNDGVTTIANNLTSTVQVFADSEYQLPYVLGSAHQGCLPPFPADVFMIPQYGYLTLNNGSQAVGRSSFYCLEYFPSQMLRTGNNFTFSYTFEDVPFHSSYAHSQSLDRLMNPLIDQYLYYLNRTQNQSGSAQNKDLLFSRGSPAGMSVQPKNWLPGPCYRQQRVSKTKTDNNNSNFTWTGASKYNLNGRESIINPGTAMASHKDDKDKFFPMSGVMIFGKESAGASNTALDNVMITDEEEIKATNPVATERFGTVAVNLQSSSTDPATGDVHVMGALPGMVWQDRDVYLQGPIWAKIPHTDGHFHPSPLMGGFGLKHPPPQILIKNTPVPANPPAEFSATKFASFITQYSTGQVSVEIEWELQKENSKRWNPEVQYTSNYCKSANVDFTVDNNGLYTEPRPIGTRYLTRPL

SEQ ID NO: 261 - protein, 736 aa, synthetic construct
MAADGYLPDWLEDNLSEGIREWWDLKPGAPKPKANQQKQDDGRGLVLPGYKYLGPFNGLDKGEPVNAADAAALEHDKAYDQQLKAGDNPYLRYNHADAEFQERLQEDTSFGGNLGRAVFQAKKRVLEPFGLVEEGAKTAPGKKRPVEQSPQEPDSSSGIGKTGQQPAKKRLNFGQTGDSESVPDPQPLGEPPATPAAVGPTTMASGGGAPMADNNEGADGVGNASGNWHCDSTWLGDRVITTSTRTWALPTYNNHLYKQISSASTGASNDNHYFGYSTPWGYFDFNRFHCHFSPRDWQRLINNNWGFRPKRLNFKLFNIQVKEVTTNDGVTTIANNLTSTVQVFADSEYQLPYVLGSAHQGCLPPFPADVFMIPQYGYLTLNNGSQAVGRSSFYCLEYFPSQMLRTGNNFTFSYTFEDVPFHSSYAHSQSLDRLMNPLIDQYLYYLNRTQNQSGSAQNKDLLFSRGSPAGMSVQPKNWLPGPCYRQQRVSKTKTDNNNSNITWTRASKYNLNGRESIINPGTAMASHKDDKDKFFPMSGVMIFGKESAGASNTALDNVMITDEEEIKATNPVATERFGTVAVNLQSSSTDPATGDVHVMGALPGMVWQDRDVYLQGPIWAKIPHTDGHFHPSPLMGGFGLKHPPPQILIKNTPVPANPPAEFSATKFASFITQYSTGQVSVEIEWELQKENSKRWNPEVQYTSNYAKSANVDFTVDNNGLYTEPRPIGTRYLTRPL

SEQ ID NO: 262 - protein, 736 aa, synthetic construct
MAADGYLPDWLEDNLSEGIREWWDLKPGAPKPKANQQKQDDGRGLVLPGYKYLGPFNGLDKGEPVNAADAAALEHDKAYDQQLKAGDNPYLRYNHADAEFQERLQEDTSFGGNLGRAVFQAKKRVLEPFGLVEEGAKTAPGKKRPVEQSPQEPDSSSGIGKTGQQPAKKRLNFGQTGDSESVPDPQPLGEPPATPAAVGPTTMASGGGAPMADNNEGADGVGNASGNWHCDSTWLGDRVITTSTRTWALPTYNNHLYKQISSASTGASNDNHYFGYSTPWGYFDFNRFHCHFSPRDWQRLINNNWGFRPKRLNFKLFNIQVKEVTTNDGVTTIANNLTSTVQVFADSEYQLPYVLGSAHQGCLPPFPADVFMIPQYGYLTLNNGSQAVGRSSFYCLEYFPSQMLRTGNNFTFSYTFEDVPFHSSYAHSQSLDRLMNPLIDQYLYYLNRTQNQSGSAQNKDLLFSRGSPAGMSVQPKNWLPGPCYRQQRVSKTKTDNNNSNITWTGASKYNLNGRESIINPGTAMASHKDDKDKFFPMSGVMIFGKESAGASNTALDNVMITDEEEIKATNPVATERFGTVAVNLQSSSTDPATGDVHVMGALPGMVWQDRDVYLQGPIWAKIPHTDGHFHPSPLMGGFGLKHPPPQILIKNTPVPANPPAEFSATKFASFITQYSTGQVSVEIEWELQKENSKRWNPEVQYTSNYCKSANVDFTVDNNGLYTEPRPIGTRYLTRPL

SEQ ID NO: 263 - protein, 736 aa, synthetic construct
MAADGYLPDWLEDNLSEGIREWWDLKPGAPKPKANQQKQDDGRGLVLPGYKYLGPFNGLDKGEPVNAADAAALEHDKAYDQQLKAGDNPYLRYNHADAEFQERLQEDTSFGGNLGRAVFQAKKRVLEPFGLVEEGAKTAPGKKRPVEQSPQEPDSSSGIGKTGQQPAKKRLNFGQTGDSESVPDPQPLGEPPATPAAVGPTTMASGGGAPMADNNEGADGVGNASGNWHCDSTWLGDRVITTSTRTWALPTYNNHLYKQISSASTGASNDNHYFGYSTPWGYFDFNRFHCHFSPRDWQRLINNNWGFRPKRLNFKLFNIQVKEVTTNDGVTTIANNLTSTVQVFADSEYQLPYVLGSAHQGCLPPFPADVFMIPQYGYLTLNNGSQAVGRSSFYCLEYFPSQMLRTGNNFTFSYTFEDVPFHSSYAHSQSLDRLMNPLIDQYLYYLNRTQNQSGSAQNKDLLFSRGSPAGMSVQPKNWLPGPCYRQQRVSKTKTDNNNSNFTWTRASKYNLNGRESIINPGTAMASHKDDKDKFFPMSGVMIFGKESAGASNTALDNVMITDEEEIKATNPVATERFGTVAVNLQSSSTDPATGDVHVMGALPGMVWQDRDVYLQGPIWAKIPHTDGHFHPSPLMGGFGLKHPPPQILIKNTPVPANPPAEFSATKFASFITQYSTGQVSVEIEWELQKENSKRWNPEVQYTSNYCKSANVDFTVDNNGLYTEPRPIGTRYLTRPL

SEQ ID NO: 264 - protein, 736 aa, synthetic construct
MAADGYLPDWLEDNLSEGIREWWDLKPGAPKPKANQQKQDDGRGLVLPGYKYLGPFNGLDKGEPVNAADAAALEHDKAYDQQLKAGDNPYLRYNHADAEFQERLQEDTSFGGNLGRAVFQAKKRVLEPFGLVEEGAKTAPGKKRPVEQSPQEPDSSSGIGKTGQQPAKKRLNFGQTGDSESVPDPQPLGEPPATPAAVGPTTMASGGGAPMADNNEGADGVGNASGNWHCDSTWLGDRVITTSTRTWALPTYNNHLYKQISSASTGASNDNHYFGYSTPWGYFDFNRFHCHFSPRDWQRLINNNWGFRPKRLNFKLFNIQVKEVTTNDGVTTIANNLTSTVQVFADSEYQLPYVLGSAHQGCLPPFPADVFMIPQYGYLTLNNGSQAVGRSSFYCLEYFPSQMLRTGNNFTFSYTFEDVPFHSSYAHSQSLDRLMNPLIDQYLYYLNRTQNQSGSAQNKDLLFSRGSPAGMSVQPKNWLPGPCYRQQRVSKTKTDNNNSNITWTRASKYNLNGRESIINPGTAMASHKDDKDKFFPMSGVMIFGKESAGASNTALDNVMITDEEEIKATNPVATERFGTVAVNLQSSSTDPATGDVHVMGALPGMVWQDRDVYLQGPIWAKIPHTDGHFHPSPLMGGFGLKHPPPQILIKNTPVPANPPAEFSATKFASFITQYSTGQVSVEIEWELQKENSKRWNPEVQYTSNYCKSANVDFTVDNNGLYTEPRPIGTRYLTRPL

SEQ ID NO: 265 - protein, 738 aa, synthetic construct
MAADGYLPDWLEDNLSEGIREWWALKPGAPKPKANQQKQDDGRGLVLPGYKYLGPFNGLDKGEPVNAADAAALEHDKAYDQQLQAGDNPYLRYNHADAEFQERLQEDTSFGGNLGRAVFQAKKRVLEPLGLVEEGAKTAPGKKRPVEPSPQRSPDSSTGIGKKGQQPARKRLNFGQTGDSESVPDPQPLGEPPAAPSGVGPNTMAAGGGAPMADNNEGADGVGSSSGNWHCDSTWLGDRVITTSTRTWALPTYNNHLYKQISNGTSGGATNDNTYFGYSTPWGYFDFNRFHCHFSPRDWQRLINNNWGFRPKRLSFKLFNIQVKEVTQNEGTKTIANNLTSTIQVFTDSEYQLPYVLGSAHQGCLPPFPADVFMIPQYGYLTLNNGSQAVGRSSFYCLEYFPSQMLRTGNNFQFTYTFEDVPFHSSYAHSQSLDRLMNPLIDQYLYYLSRTQTTGGTANTQTLGFSQGGPNTMANQAKNWLPGPCYRQQRVSTTTGQNNNSNIAWTAGTKYHLNGRNSLANPGIAMATHKDDEERFFPSNGILIFGKQNAARDNADYSDVMLTSEEEIKTTNPVATEEYGIVADNLQQQNTAPQIGTVNSQGALPGMVWQNRDVYLQGPIWAKIPHTDGNFHPSPLMGGFGLKHPPPQILIKNTPVPADPPTTFNQSKLNSFITQYSTGQVSVEIEWELQKENSKRWNPEIQYTSNYYKSTSVDFAVNTEGVYSEPRPIGTRYLTRNL

SEQ ID NO: 266 - protein, 738 aa, synthetic construct
MAADGYLPDWLEDNLSEGIREWWALKPGAPKPKANQQKQDDGRGLVLPGYKYLGPFNGLDKGEPVNAADAAALEHDKAYDQQLQAGDNPYLRYNHADAEFQERLQEDTSFGGNLGRAVFQAKKRVLEPLGLVEEGAKTAPGKKRPVEPSPQRSPDSSTGIGKKGQQPARKRLNFGQTGDSESVPDPQPLGEPPAAPSGVGPNTMAAGGGAPMADNNEGADGVGSSSGNWHCDSTWLGDRVITTSTRTWALPTYNNHLYKQISNGTSGGATNDNTYFGYSTPWGYFDFNRFHCHFSPRDWQRLINNNWGFRPKRLSFKLFNIQVKEVTQNEGTKTIANNLTSTIQVFTDSEYQLPYVLGSAHQGCLPPFPADVFMIPQYGYLTLNNGSQAVGRSSFYCLEYFPSQMLRTGNNFQFTYTFEDVPFHSSYAHSQSLDRLMNPLIDQYLYYLSRTQTTGGTANTQTLGFSQGGPNTMANQAKNWLPGPCYRQQRVSTTTGQNNNSNFAWTRGTKYHLNGRNSLANPGIAMATHKDDEERFFPSNGILIFGKQNAARDNADYSDVMLTSEEEIKTTNPVATEEYGIVADNLQQQNTAPQIGTVNSQGALPGMVWQNRDVYLQGPIWAKIPHTDGNFHPSPLMGGFGLKHPPPQILIKNTPVPADPPTTFNQSKLNSFITQYSTGQVSVEIEWELQKENSKRWNPEIQYTSNYYKSTSVDFAVNTEGVYSEPRPIGTRYLTRNL

SEQ ID NO: 267 - protein, 738 aa, synthetic construct
MAADGYLPDWLEDNLSEGIREWWALKPGAPKPKANQQKQDDGRGLVLPGYKYLGPFNGLDKGEPVNAADAAALEHDKAYDQQLQAGDNPYLRYNHADAEFQERLQEDTSFGGNLGRAVFQAKKRVLEPLGLVEEGAKTAPGKKRPVEPSPQRSPDSSTGIGKKGQQPARKRLNFGQTGDSESVPDPQPLGEPPAAPSGVGPNTMAAGGGAPMADNNEGADGVGSSSGNWHCDSTWLGDRVITTSTRTWALPTYNNHLYKQISNGTSGGATNDNTYFGYSTPWGYFDFNRFHCHFSPRDWQRLINNNWGFRPKRLSFKLFNIQVKEVTQNEGTKTIANNLTSTIQVFTDSEYQLPYVLGSAHQGCLPPFPADVFMIPQYGYLTLNNGSQAVGRSSFYCLEYFPSQMLRTGNNFQFTYTFEDVPFHSSYAHSQSLDRLMNPLIDQYLYYLSRTQTTGGTANTQTLGFSQGGPNTMANQAKNWLPGPCYRQQRVSTTTGQNNNSNFAWTAGTKYHLNGRNSLANPGIAMATHKDDEERFFPSNGILIFGKQNAARDNADYSDVMLTSEEEIKTTNPVATEEYGIVADNLQQQNTAPQIGTVNSQGALPGMVWQNRDVYLQGPIWAKIPHTDGNFHPSPLMGGFGLKHPPPQILIKNTPVPADPPTTFNQSKLNSFITQYSTGQVSVEIEWELQKENSKRWNPEIQYTSNYCKSTSVDFAVNTEGVYSEPRPIGTRYLTRNL

SEQ ID NO: 268 - protein, 738 aa, synthetic construct
MAADGYLPDWLEDNLSEGIREWWALKPGAPKPKANQQKQDDGRGLVLPGYKYLGPFNGLDKGEPVNAADAAALEHDKAYDQQLQAGDNPYLRYNHADAEFQERLQEDTSFGGNLGRAVFQAKKRVLEPLGLVEEGAKTAPGKKRPVEPSPQRSPDSSTGIGKKGQQPARKRLNFGQTGDSESVPDPQPLGEPPAAPSGVGPNTMAAGGGAPMADNNEGADGVGSSSGNWHCDSTWLGDRVITTSTRTWALPTYNNHLYKQISNGTSGGATNDNTYFGYSTPWGYFDFNRFHCHFSPRDWQRLINNNWGFRPKRLSFKLFNIQVKEVTQNEGTKTIANNLTSTIQVFTDSEYQLPYVLGSAHQGCLPPFPADVFMIPQYGYLTLNNGSQAVGRSSFYCLEYFPSQMLRTGNNFQFTYTFEDVPFHSSYAHSQSLDRLMNPLIDQYLYYLSRTQTTGGTANTQTLGFSQGGPNTMANQAKNWLPGPCYRQQRVSTTTGQNNNSNIAWTRGTKYHLNGRNSLANPGIAMATHKDDEERFFPSNGILIFGKQNAARDNADYSDVMLTSEEEIKTTNPVATEEYGIVADNLQQQNTAPQIGTVNSQGALPGMVWQNRDVYLQGPIWAKIPHTDGNFHPSPLMGGFGLKHPPPQILIKNTPVPADPPTTFNQSKLNSFITQYSTGQVSVEIEWELQKENSKRWNPEIQYTSNYYKSTSVDFAVNTEGVYSEPRPIGTRYLTRNL

SEQ ID NO: 269 - protein, 738 aa, synthetic construct
MAADGYLPDWLEDNLSEGIREWWALKPGAPKPKANQQKQDDGRGLVLPGYKYLGPFNGLDKGEPVNAADAAALEHDKAYDQQLQAGDNPYLRYNHADAEFQERLQEDTSFGGNLGRAVFQAKKRVLEPLGLVEEGAKTAPGKKRPVEPSPQRSPDSSTGIGKKGQQPARKRLNFGQTGDSESVPDPQPLGEPPAAPSGVGPNTMAAGGGAPMADNNEGADGVGSSSGNWHCDSTWLGDRVITTSTRTWALPTYNNHLYKQISNGTSGGATNDNTYFGYSTPWGYFDFNRFHCHFSPRDWQRLINNNWGFRPKRLSFKLFNIQVKEVTQNEGTKTIANNLTSTIQVFTDSEYQLPYVLGSAHQGCLPPFPADVFMIPQYGYLTLNNGSQAVGRSSFYCLEYFPSQMLRTGNNFQFTYTFEDVPFHSSYAHSQSLDRLMNPLIDQYLYYLSRTQTTGGTANTQTLGFSQGGPNTMANQAKNWLPGPCYRQQRVSTTTGQNNNSNIAWTAGTKYHLNGRNSLANPGIAMATHKDDEERFFPSNGILIFGKQNAARDNADYSDVMLTSEEEIKTTNPVATEEYGIVADNLQQQNTAPQIGTVNSQGALPGMVWQNRDVYLQGPIWAKIPHTDGNFHPSPLMGGFGLKHPPPQILIKNTPVPADPPTTFNQSKLNSFITQYSTGQVSVEIEWELQKENSKRWNPEIQYTSNYCKSTSVDFAVNTEGVYSEPRPIGTRYLTRNL

SEQ ID NO: 270 - protein, 738 aa, synthetic construct
MAADGYLPDWLEDNLSEGIREWWALKPGAPKPKANQQKQDDGRGLVLPGYKYLGPFNGLDKGEPVNAADAAALEHDKAYDQQLQAGDNPYLRYNHADAEFQERLQEDTSFGGNLGRAVFQAKKRVLEPLGLVEEGAKTAPGKKRPVEPSPQRSPDSSTGIGKKGQQPARKRLNFGQTGDSESVPDPQPLGEPPAAPSGVGPNTMAAGGGAPMADNNEGADGVGSSSGNWHCDSTWLGDRVITTSTRTWALPTYNNHLYKQISNGTSGGATNDNTYFGYSTPWGYFDFNRFHCHFSPRDWQRLINNNWGFRPKRLSFKLFNIQVKEVTQNEGTKTIANNLTSTIQVFTDSEYQLPYVLGSAHQGCLPPFPADVFMIPQYGYLTLNNGSQAVGRSSFYCLEYFPSQMLRTGNNFQFTYTFEDVPFHSSYAHSQSLDRLMNPLIDQYLYYLSRTQTTGGTANTQTLGFSQGGPNTMANQAKNWLPGPCYRQQRVSTTTGQNNNSNFAWTRGTKYHLNGRNSLANPGIAMATHKDDEERFFPSNGILIFGKQNAARDNADYSDVMLTSEEEIKTTNPVATEEYGIVADNLQQQNTAPQIGTVNSQGALPGMVWQNRDVYLQGPIWAKIPHTDGNFHPSPLMGGFGLKHPPPQILIKNTPVPADPPTTFNQSKLNSFITQYSTGQVSVEIEWELQKENSKRWNPEIQYTSNYCKSTSVDFAVNTEGVYSEPRPIGTRYLTRNL

SEQ ID NO: 271 - protein, 738 aa, synthetic construct
MAADGYLPDWLEDNLSEGIREWWALKPGAPKPKANQQKQDDGRGLVLPGYKYLGPFNGLDKGEPVNAADAAALEHDKAYDQQLQAGDNPYLRYNHADAEFQERLQEDTSFGGNLGRAVFQAKKRVLEPLGLVEEGAKTAPGKKRPVEPSPQRSPDSSTGIGKKGQQPARKRLNFGQTGDSESVPDPQPLGEPPAAPSGVGPNTMAAGGGAPMADNNEGADGVGSSSGNWHCDSTWLGDRVITTSTRTWALPTYNNHLYKQISNGTSGGATNDNTYFGYSTPWGYFDFNRFHCHFSPRDWQRLINNNWGFRPKRLSFKLFNIQVKEVTQNEGTKTIANNLTSTIQVFTDSEYQLPYVLGSAHQGCLPPFPADVFMIPQYGYLTLNNGSQAVGRSSFYCLEYFPSQMLRTGNNFQFTYTFEDVPFHSSYAHSQSLDRLMNPLIDQYLYYLSRTQTTGGTANTQTLGFSQGGPNTMANQAKNWLPGPCYRQQRVSTTTGQNNNSNIAWTRGTKYHLNGRNSLANPGIAMATHKDDEERFFPSNGILIFGKQNAARDNADYSDVMLTSEEEIKTTNPVATEEYGIVADNLQQQNTAPQIGTVNSQGALPGMVWQNRDVYLQGPIWAKIPHTDGNFHPSPLMGGFGLKHPPPQILIKNTPVPADPPTTFNQSKLNSFITQYSTGQVSVEIEWELQKENSKRWNPEIQYTSNYCKSTSVDFAVNTEGVYSEPRPIGTRYLTRNL

SEQ ID NO: 272 - protein, 738 aa, synthetic construct
MAADGYLPDWLEDNLSEGIREWWALKPGAPKPKANQQKQDDGRGLVLPGYKYLGPFNGLDKGEPVNAADAAALEHDKAYDQQLQAGDNPYLRYNHADAEFQERLQEDTSFGGNLGRAVFQAKKRVLEPLGLVEEGAKTAPGKKRPVEPSPQRSPDSSTGIGKKGQQPARKRLNFGQTGDSESVPDPQPLGEPPAAPSGVGPNTMAAGGGAPMADNNEGADGVGSSSGNWHCDSTWLGDRVITTSTRTWALPTYNNHLYKQISNGTSGGATNDNTYFGYSTPWGYFDFNRFHCHFSPRDWQRLINNNWGFRPKRLSFKLFNIQVKEVTQNEGTKTIANNLTSTIQVFADSEYQLPYVLGSAHQGCLPPFPADVFMIPQYGYLTLNNGSQAVGRSSFYCLEYFPSQMLRTGNNFQFTYTFEDVPFHSSYAHSQSLDRLMNPLIDQYLYYLSRTQTTGGTANTQTLGFSQGGPNTMANQAKNWLPGPCYRQQRVSTTTGQNNNSNFAWTAGTKYHLNGRNSLANPGIAMATHKDDEERFFPSNGILIFGKQNAARDNADYSDVMLTSEEEIKTTNPVATEEYGIVADNLQQQNTAPQIGTVNSQGALPGMVWQNRDVYLQGPIWAKIPHTDGNFHPSPLMGGFGLKHPPPQILIKNTPVPADPPTTFNQSKLNSFITQYSTGQVSVEIEWELQKENSKRWNPEIQYTSNYYKSTSVDFAVNTEGVYSEPRPIGTRYLTRNL

SEQ ID NO: 273 - protein, 738 aa, synthetic construct
MAADGYLPDWLEDNLSEGIREWWALKPGAPKPKANQQKQDDGRGLVLPGYKYLGPFNGLDKGEPVNAADAAALEHDKAYDQQLQAGDNPYLRYNHADAEFQERLQEDTSFGGNLGRAVFQAKKRVLEPLGLVEEGAKTAPGKKRPVEPSPQRSPDSSTGIGKKGQQPARKRLNFGQTGDSESVPDPQPLGEPPAAPSGVGPNTMAAGGGAPMADNNEGADGVGSSSGNWHCDSTWLGDRVITTSTRTWALPTYNNHLYKQISNGTSGGATNDNTYFGYSTPWGYFDFNRFHCHFSPRDWQRLINNNWGFRPKRLSFKLFNIQVKEVTQNEGTKTIANNLTSTIQVFADSEYQLPYVLGSAHQGCLPPFPADVFMIPQYGYLTLNNGSQAVGRSSFYCLEYFPSQMLRTGNNFQFTYTFEDVPFHSSYAHSQSLDRLMNPLIDQYLYYLSRTQTTGGTANTQTLGFSQGGPNTMANQAKNWLPGPCYRQQRVSTTTGQNNNSNIAWTAGTKYHLNGRNSLANPGIAMATHKDDEERFFPSNGILIFGKQNAARDNADYSDVMLTSEEEIKTTNPVATEEYGIVADNLQQQNTAPQIGTVNSQGALPGMVWQNRDVYLQGPIWAKIPHTDGNFHPSPLMGGFGLKHPPPQILIKNTPVPADPPTTFNQSKLNSFITQYSTGQVSVEIEWELQKENSKRWNPEIQYTSNYYKSTSVDFAVNTEGVYSEPRPIGTRYLTRNL

SEQ ID NO: 274 - protein, 738 aa, synthetic construct
MAADGYLPDWLEDNLSEGIREWWALKPGAPKPKANQQKQDDGRGLVLPGYKYLGPFNGLDKGEPVNAADAAALEHDKAYDQQLQAGDNPYLRYNHADAEFQERLQEDTSFGGNLGRAVFQAKKRVLEPLGLVEEGAKTAPGKKRPVEPSPQRSPDSSTGIGKKGQQPARKRLNFGQTGDSESVPDPQPLGEPPAAPSGVGPNTMAAGGGAPMADNNEGADGVGSSSGNWHCDSTWLGDRVITTSTRTWALPTYNNHLYKQISNGTSGGATNDNTYFGYSTPWGYFDFNRFHCHFSPRDWQRLINNNWGFRPKRLSFKLFNIQVKEVTQNEGTKTIANNLTSTIQVFADSEYQLPYVLGSAHQGCLPPFPADVFMIPQYGYLTLNNGSQAVGRSSFYCLEYFPSQMLRTGNNFQFTYTFEDVPFHSSYAHSQSLDRLMNPLIDQYLYYLSRTQTTGGTANTQTLGFSQGGPNTMANQAKNWLPGPCYRQQRVSTTTGQNNNSNFAWTRGTKYHLNGRNSLANPGIAMATHKDDEERFFPSNGILIFGKQNAARDNADYSDVMLTSEEEIKTTNPVATEEYGIVADNLQQQNTAPQIGTVNSQGALPGMVWQNRDVYLQGPIWAKIPHTDGNFHPSPLMGGFGLKHPPPQILIKNTPVPADPPTTFNQSKLNSFITQYSTGQVSVEIEWELQKENSKRWNPEIQYTSNYYKSTSVDFAVNTEGVYSEPRPIGTRYLTRNL

SEQ ID NO: 275 - protein, 738 aa, synthetic construct
MAADGYLPDWLEDNLSEGIREWWALKPGAPKPKANQQKQDDGRGLVLPGYKYLGPFNGLDKGEPVNAADAAALEHDKAYDQQLQAGDNPYLRYNHADAEFQERLQEDTSFGGNLGRAVFQAKKRVLEPLGLVEEGAKTAPGKKRPVEPSPQRSPDSSTGIGKKGQQPARKRLNFGQTGDSESVPDPQPLGEPPAAPSGVGPNTMAAGGGAPMADNNEGADGVGSSSGNWHCDSTWLGDRVITTSTRTWALPTYNNHLYKQISNGTSGGATNDNTYFGYSTPWGYFDFNRFHCHFSPRDWQRLINNNWGFRPKRLSFKLFNIQVKEVTQNEGTKTIANNLTSTIQVFADSEYQLPYVLGSAHQGCLPPFPADVFMIPQYGYLTLNNGSQAVGRSSFYCLEYFPSQMLRTGNNFQFTYTFEDVPFHSSYAHSQSLDRLMNPLIDQYLYYLSRTQTTGGTANTQTLGFSQGGPNTMANQAKNWLPGPCYRQQRVSTTTGQNNNSNFAWTAGTKYHLNGRNSLANPGIAMATHKDDEERFFPSNGILIFGKQNAARDNADYSDVMLTSEEEIKTTNPVATEEYGIVADNLQQQNTAPQIGTVNSQGALPGMVWQNRDVYLQGPIWAKIPHTDGNFHPSPLMGGFGLKHPPPQILIKNTPVPADPPTTFNQSKLNSFITQYSTGQVSVEIEWELQKENSKRWNPEIQYTSNYCKSTSVDFAVNTEGVYSEPRPIGTRYLTRNL

SEQ ID NO: 276 - protein, 738 aa, synthetic construct
MAADGYLPDWLEDNLSEGIREWWALKPGAPKPKANQQKQDDGRGLVLPGYKYLGPFNGLDKGEPVNAADAAALEHDKAYDQQLQAGDNPYLRYNHADAEFQERLQEDTSFGGNLGRAVFQAKKRVLEPLGLVEEGAKTAPGKKRPVEPSPQRSPDSSTGIGKKGQQPARKRLNFGQTGDSESVPDPQPLGEPPAAPSGVGPNTMAAGGGAPMADNNEGADGVGSSSGNWHCDSTWLGDRVITTSTRTWALPTYNNHLYKQISNGTSGGATNDNTYFGYSTPWGYFDFNRFHCHFSPRDWQRLINNNWGFRPKRLSFKLFNIQVKEVTQNEGTKTIANNLTSTIQVFADSEYQLPYVLGSAHQGCLPPFPADVFMIPQYGYLTLNNGSQAVGRSSFYCLEYFPSQMLRTGNNFQFTYTFEDVPFHSSYAHSQSLDRLMNPLIDQYLYYLSRTQTTGGTANTQTLGFSQGGPNTMANQAKNWLPGPCYRQQRVSTTTGQNNNSNIAWTRGTKYHLNGRNSLANPGIAMATHKDDEERFFPSNGILIFGKQNAARDNADYSDVMLTSEEEIKTTNPVATEEYGIVADNLQQQNTAPQIGTVNSQGALPGMVWQNRDVYLQGPIWAKIPHTDGNFHPSPLMGGFGLKHPPPQILIKNTPVPADPPTTFNQSKLNSFITQYSTGQVSVEIEWELQKENSKRWNPEIQYTSNYYKSTSVDFAVNTEGVYSEPRPIGTRYLTRNL

SEQ ID NO: 277 - protein, 738 aa, synthetic construct
MAADGYLPDWLEDNLSEGIREWWALKPGAPKPKANQQKQDDGRGLVLPGYKYLGPFNGLDKGEPVNAADAAALEHDKAYDQQLQAGDNPYLRYNHADAEFQERLQEDTSFGGNLGRAVFQAKKRVLEPLGLVEEGAKTAPGKKRPVEPSPQRSPDSSTGIGKKGQQPARKRLNFGQTGDSESVPDPQPLGEPPAAPSGVGPNTMAAGGGAPMADNNEGADGVGSSSGNWHCDSTWLGDRVITTSTRTWALPTYNNHLYKQISNGTSGGATNDNTYFGYSTPWGYFDFNRFHCHFSPRDWQRLINNNWGFRPKRLSFKLFNIQVKEVTQNEGTKTIANNLTSTIQVFADSEYQLPYVLGSAHQGCLPPFPADVFMIPQYGYLTLNNGSQAVGRSSFYCLEYFPSQMLRTGNNFQFTYTFEDVPFHSSYAHSQSLDRLMNPLIDQYLYYLSRTQTTGGTANTQTLGFSQGGPNTMANQAKNWLPGPCYRQQRVSTTTGQNNNSNIAWTAGTKYHLNGRNSLANPGIAMATHKDDEERFFPSNGILIFGKQNAARDNADYSDVMLTSEEEIKTTNPVATEEYGIVADNLQQQNTAPQIGTVNSQGALPGMVWQNRDVYLQGPIWAKIPHTDGNFHPSPLMGGFGLKHPPPQILIKNTPVPADPPTTFNQSKLNSFITQYSTGQVSVEIEWELQKENSKRWNPEIQYTSNYCKSTSVDFAVNTEGVYSEPRPIGTRYLTRNL

SEQ ID NO: 278 - protein, 738 aa, synthetic construct
MAADGYLPDWLEDNLSEGIREWWALKPGAPKPKANQQKQDDGRGLVLPGYKYLGPFNGLDKGEPVNAADAAALEHDKAYDQQLQAGDNPYLRYNHADAEFQERLQEDTSFGGNLGRAVFQAKKRVLEPLGLVEEGAKTAPGKKRPVEPSPQRSPDSSTGIGKKGQQPARKRLNFGQTGDSESVPDPQPLGEPPAAPSGVGPNTMAAGGGAPMADNNEGADGVGSSSGNWHCDSTWLGDRVITTSTRTWALPTYNNHLYKQISNGTSGGATNDNTYFGYSTPWGYFDFNRFHCHFSPRDWQRLINNNWGFRPKRLSFKLFNIQVKEVTQNEGTKTIANNLTSTIQVFADSEYQLPYVLGSAHQGCLPPFPADVFMIPQYGYLTLNNGSQAVGRSSFYCLEYFPSQMLRTGNNFQFTYTFEDVPFHSSYAHSQSLDRLMNPLIDQYLYYLSRTQTTGGTANTQTLGFSQGGPNTMANQAKNWLPGPCYRQQRVSTTTGQNNNSNFAWTRGTKYHLNGRNSLANPGIAMATHKDDEERFFPSNGILIFGKQNAARDNADYSDVMLTSEEEIKTTNPVATEEYGIVADNLQQQNTAPQIGTVNSQGALPGMVWQNRDVYLQGPIWAKIPHTDGNFHPSPLMGGFGLKHPPPQILIKNTPVPADPPTTFNQSKLNSFITQYSTGQVSVEIEWELQKENSKRWNPEIQYTSNYCKSTSVDFAVNTEGVYSEPRPIGTRYLTRNL

SEQ ID NO: 279 - protein, 738 aa, synthetic construct
MAADGYLPDWLEDNLSEGIREWWALKPGAPKPKANQQKQDDGRGLVLPGYKYLGPFNGLDKGEPVNAADAAALEHDKAYDQQLQAGDNPYLRYNHADAEFQERLQEDTSFGGNLGRAVFQAKKRVLEPLGLVEEGAKTAPGKKRPVEPSPQRSPDSSTGIGKKGQQPARKRLNFGQTGDSESVPDPQPLGEPPAAPSGVGPNTMAAGGGAPMADNNEGADGVGSSSGNWHCDSTWLGDRVITTSTRTWALPTYNNHLYKQISNGTSGGATNDNTYFGYSTPWGYFDFNRFHCHFSPRDWQRLINNNWGFRPKRLSFKLFNIQVKEVTQNEGTKTIANNLTSTIQVFADSEYQLPYVLGSAHQGCLPPFPADVFMIPQYGYLTLNNGSQAVGRSSFYCLEYFPSQMLRTGNNFQFTYTFEDVPFHSSYAHSQSLDRLMNPLIDQYLYYLSRTQTTGGTANTQTLGFSQGGPNTMANQAKNWLPGPCYRQQRVSTTTGQNNNSNIAWTRGTKYHLNGRNSLANPGIAMATHKDDEERFFPSNGILIFGKQNAARDNADYSDVMLTSEEEIKTTNPVATEEYGIVADNLQQQNTAPQIGTVNSQGALPGMVWQNRDVYLQGPIWAKIPHTDGNFHPSPLMGGFGLKHPPPQILIKNTPVPADPPTTFNQSKLNSFITQYSTGQVSVEIEWELQKENSKRWNPEIQYTSNYCKSTSVDFAVNTEGVYSEPRPIGTRYLTRNL

SEQ ID NO: 280 - protein, 736 aa, synthetic construct
MAADGYLPDWLEDNLSEGIREWWALKPGAPQPKANQQHQDNARGLVLPGYKYLGPGNGLDKGEPVNAADAAALEHDKAYDQQLKAGDNPYLKYNHADAEFQERLKEDTSFGGNLGRAVFQAKKRLLEPLGLVEEAAKTAPGKKRPVEQSPQEPDSSAGIGKSGAQPAKKRLNFGQTGDTESVPDPQPIGEPPAAPSGVGSLTMASGGGAPVADNNEGADGVGSSSGNWHCDSQWLGDRVITTSTRTWALPTYNNHLYKQISNSTSGGSSNDNAYFGYSTPWGYFDFNRFHCHFSPRDWQRLINNNWGFRPKRLNFKLFNIQVKEVTDNNGVKTIANNLTSTVQVFTDSDYQLPYVLGSAHEGCLPPFPADVFMIPQYGYLTLNDGSQAVGRSSFYCLEYFPSQMLRTGNNFQFSYEFENVPFHSSYAHSQSLDRLMNPLIDQYLYYLSKTINGSGQNQQTLKFSVAGPSNMAVQGRNYIPGPSYRQQRVSTTVTQNNNSEIAWPGASSWALNGRNSLMNPGPAMASHKEGEDRFFPLSGSLIFGKQGTGRDNVDADKVMITNEEEIKTTNPVATESYGQVATNHQSAQAQAQTGWVQNQGILPGMVWQDRDVYLQGPIWAKIPHTDGNFHPSPLMGGFGMKHPPPQILIKNTPVPADPPTAFNKDKLNSFITQYSTGQVSVEIEWELQKENSKRWNPEIQYTSNYYKSNNVEFAVNTEGVYSEPRPIGTRYLTRNL

SEQ ID NO: 281 - protein, 736 aa, synthetic construct
MAADGYLPDWLEDNLSEGIREWWALKPGAPQPKANQQHQDNARGLVLPGYKYLGPGNGLDKGEPVNAADAAALEHDKAYDQQLKAGDNPYLKYNHADAEFQERLKEDTSFGGNLGRAVFQAKKRLLEPLGLVEEAAKTAPGKKRPVEQSPQEPDSSAGIGKSGAQPAKKRLNFGQTGDTESVPDPQPIGEPPAAPSGVGSLTMASGGGAPVADNNEGADGVGSSSGNWHCDSQWLGDRVITTSTRTWALPTYNNHLYKQISNSTSGGSSNDNAYFGYSTPWGYFDFNRFHCHFSPRDWQRLINNNWGFRPKRLNFKLFNIQVKEVTDNNGVKTIANNLTSTVQVFTDSDYQLPYVLGSAHEGCLPPFPADVFMIPQYGYLTLNDGSQAVGRSSFYCLEYFPSQMLRTGNNFQFSYEFENVPFHSSYAHSQSLDRLMNPLIDQYLYYLSKTINGSGQNQQTLKFSVAGPSNMAVQGRNYIPGPSYRQQRVSTTVTQNNNSEFAWPGASSWALNGRNSLMNPGPAMASHKEGEDRFFPLSGSLIFGKQGTGRDNVDADKVMITNEEEIKTTNPVATESYGQVATNHQSAQAQAQTGWVQNQGILPGMVWQDRDVYLQGPIWAKIPHTDGNFHPSPLMGGFGMKHPPPQILIKNTPVPADPPTAFNKDKLNSFITQYSTGQVSVEIEWELQKENSKRWNPEIQYTSNYCKSNNVEFAVNTEGVYSEPRPIGTRYLTRNL

SEQ ID NO: 282 - protein, 736 aa, synthetic construct
MAADGYLPDWLEDNLSEGIREWWALKPGAPQPKANQQHQDNARGLVLPGYKYLGPGNGLDKGEPVNAADAAALEHDKAYDQQLKAGDNPYLKYNHADAEFQERLKEDTSFGGNLGRAVFQAKKRLLEPLGLVEEAAKTAPGKKRPVEQSPQEPDSSAGIGKSGAQPAKKRLNFGQTGDTESVPDPQPIGEPPAAPSGVGSLTMASGGGAPVADNNEGADGVGSSSGNWHCDSQWLGDRVITTSTRTWALPTYNNHLYKQISNSTSGGSSNDNAYFGYSTPWGYFDFNRFHCHFSPRDWQRLINNNWGFRPKRLNFKLFNIQVKEVTDNNGVKTIANNLTSTVQVFTDSDYQLPYVLGSAHEGCLPPFPADVFMIPQYGYLTLNDGSQAVGRSSFYCLEYFPSQMLRTGNNFQFSYEFENVPFHSSYAHSQSLDRLMNPLIDQYLYYLSKTINGSGQNQQTLKFSVAGPSNMAVQGRNYIPGPSYRQQRVSTTVTQNNNSEIAWPRASSWALNGRNSLMNPGPAMASHKEGEDRFFPLSGSLIFGKQGTGRDNVDADKVMITNEEEIKTTNPVATESYGQVATNHQSAQAQAQTGWVQNQGILPGMVWQDRDVYLQGPIWAKIPHTDGNFHPSPLMGGFGMKHPPPQILIKNTPVPADPPTAFNKDKLNSFITQYSTGQVSVEIEWELQKENSKRWNPEIQYTSNYYKSNNVEFAVNTEGVYSEPRPIGTRYLTRNL

SEQ ID NO: 283 - protein, 736 aa, synthetic construct
MAADGYLPDWLEDNLSEGIREWWALKPGAPQPKANQQHQDNARGLVLPGYKYLGPGNGLDKGEPVNAADAAALEHDKAYDQQLKAGDNPYLKYNHADAEFQERLKEDTSFGGNLGRAVFQAKKRLLEPLGLVEEAAKTAPGKKRPVEQSPQEPDSSAGIGKSGAQPAKKRLNFGQTGDTESVPDPQPIGEPPAAPSGVGSLTMASGGGAPVADNNEGADGVGSSSGNWHCDSQWLGDRVITTSTRTWALPTYNNHLYKQISNSTSGGSSNDNAYFGYSTPWGYFDFNRFHCHFSPRDWQRLINNNWGFRPKRLNFKLFNIQVKEVTDNNGVKTIANNLTSTVQVFTDSDYQLPYVLGSAHEGCLPPFPADVFMIPQYGYLTLNDGSQAVGRSSFYCLEYFPSQMLRTGNNFQFSYEFENVPFHSSYAHSQSLDRLMNPLIDQYLYYLSKTINGSGQNQQTLKFSVAGPSNMAVQGRNYIPGPSYRQQRVSTTVTQNNNSEIAWPGASSWALNGRNSLMNPGPAMASHKEGEDRFFPLSGSLIFGKQGTGRDNVDADKVMITNEEEIKTTNPVATESYGQVATNHQSAQAQAQTGWVQNQGILPGMVWQDRDVYLQGPIWAKIPHTDGNFHPSPLMGGFGMKHPPPQILIKNTPVPADPPTAFNKDKLNSFITQYSTGQVSVEIEWELQKENSKRWNPEIQYTSNYCKSNNVEFAVNTEGVYSEPRPIGTRYLTRNL

SEQ ID NO: 284 - protein, 736 aa, synthetic construct
MAADGYLPDWLEDNLSEGIREWWALKPGAPQPKANQQHQDNARGLVLPGYKYLGPGNGLDKGEPVNAADAAALEHDKAYDQQLKAGDNPYLKYNHADAEFQERLKEDTSFGGNLGRAVFQAKKRLLEPLGLVEEAAKTAPGKKRPVEQSPQEPDSSAGIGKSGAQPAKKRLNFGQTGDTESVPDPQPIGEPPAAPSGVGSLTMASGGGAPVADNNEGADGVGSSSGNWHCDSQWLGDRVITTSTRTWALPTYNNHLYKQISNSTSGGSSNDNAYFGYSTPWGYFDFNRFHCHFSPRDWQRLINNNWGFRPKRLNFKLFNIQVKEVTDNNGVKTIANNLTSTVQVFTDSDYQLPYVLGSAHEGCLPPFPADVFMIPQYGYLTLNDGSQAVGRSSFYCLEYFPSQMLRTGNNFQFSYEFENVPFHSSYAHSQSLDRLMNPLIDQYLYYLSKTINGSGQNQQTLKFSVAGPSNMAVQGRNYIPGPSYRQQRVSTTVTQNNNSEFAWPRASSWALNGRNSLMNPGPAMASHKEGEDRFFPLSGSLIFGKQGTGRDNVDADKVMITNEEEIKTTNPVATESYGQVATNHQSAQAQAQTGWVQNQGILPGMVWQDRDVYLQGPIWAKIPHTDGNFHPSPLMGGFGMKHPPPQILIKNTPVPADPPTAFNKDKLNSFITQYSTGQVSVEIEWELQKENSKRWNPEIQYTSNYCKSNNVEFAVNTEGVYSEPRPIGTRYLTRNL

SEQ ID NO: 285 - protein, 736 aa, synthetic construct
MAADGYLPDWLEDNLSEGIREWWALKPGAPQPKANQQHQDNARGLVLPGYKYLGPGNGLDKGEPVNAADAAALEHDKAYDQQLKAGDNPYLKYNHADAEFQERLKEDTSFGGNLGRAVFQAKKRLLEPLGLVEEAAKTAPGKKRPVEQSPQEPDSSAGIGKSGAQPAKKRLNFGQTGDTESVPDPQPIGEPPAAPSGVGSLTMASGGGAPVADNNEGADGVGSSSGNWHCDSQWLGDRVITTSTRTWALPTYNNHLYKQISNSTSGGSSNDNAYFGYSTPWGYFDFNRFHCHFSPRDWQRLINNNWGFRPKRLNFKLFNIQVKEVTDNNGVKTIANNLTSTVQVFADSDYQLPYVLGSAHEGCLPPFPADVFMIPQYGYLTLNDGSQAVGRSSFYCLEYFPSQMLRTGNNFQFSYEFENVPFHSSYAHSQSLDRLMNPLIDQYLYYLSKTINGSGQNQQTLKFSVAGPSNMAVQGRNYIPGPSYRQQRVSTTVTQNNNSEFAWPGASSWALNGRNSLMNPGPAMASHKEGEDRFFPLSGSLIFGKQGTGRDNVDADKVMITNEEEIKTTNPVATESYGQVATNHQSAQAQAQTGWVQNQGILPGMVWQDRDVYLQGPIWAKIPHTDGNFHPSPLMGGFGMKHPPPQILIKNTPVPADPPTAFNKDKLNSFITQYSTGQVSVEIEWELQKENSKRWNPEIQYTSNYYKSNNVEFAVNTEGVYSEPRPIGTRYLTRNL

SEQ ID NO: 286 - protein, 736 aa, synthetic construct
MAADGYLPDWLEDNLSEGIREWWALKPGAPQPKANQQHQDNARGLVLPGYKYLGPGNGLDKGEPVNAADAAALEHDKAYDQQLKAGDNPYLKYNHADAEFQERLKEDTSFGGNLGRAVFQAKKRLLEPLGLVEEAAKTAPGKKRPVEQSPQEPDSSAGIGKSGAQPAKKRLNFGQTGDTESVPDPQPIGEPPAAPSGVGSLTMASGGGAPVADNNEGADGVGSSSGNWHCDSQWLGDRVITTSTRTWALPTYNNHLYKQISNSTSGGSSNDNAYFGYSTPWGYFDFNRFHCHFSPRDWQRLINNNWGFRPKRLNFKLFNIQVKEVTDNNGVKTIANNLTSTVQVFADSDYQLPYVLGSAHEGCLPPFPADVFMIPQYGYLTLNDGSQAVGRSSFYCLEYFPSQMLRTGNNFQFSYEFENVPFHSSYAHSQSLDRLMNPLIDQYLYYLSKTINGSGQNQQTLKFSVAGPSNMAVQGRNYIPGPSYRQQRVSTTVTQNNNSEIAWPGASSWALNGRNSLMNPGPAMASHKEGEDRFFPLSGSLIFGKQGTGRDNVDADKVMITNEEEIKTTNPVATESYGQVATNHQSAQAQAQTGWVQNQGILPGMVWQDRDVYLQGPIWAKIPHTDGNFHPSPLMGGFGMKHPPPQILIKNTPVPADPPTAFNKDKLNSFITQYSTGQVSVEIEWELQKENSKRWNPEIQYTSNYYKSNNVEFAVNTEGVYSEPRPIGTRYLTRNL

SEQ ID NO: 287 - protein, 736 aa, synthetic construct
MAADGYLPDWLEDNLSEGIREWWALKPGAPQPKANQQHQDNARGLVLPGYKYLGPGNGLDKGEPVNAADAAALEHDKAYDQQLKAGDNPYLKYNHADAEFQERLKEDTSFGGNLGRAVFQAKKRLLEPLGLVEEAAKTAPGKKRPVEQSPQEPDSSAGIGKSGAQPAKKRLNFGQTGDTESVPDPQPIGEPPAAPSGVGSLTMASGGGAPVADNNEGADGVGSSSGNWHCDSQWLGDRVITTSTRTWALPTYNNHLYKQISNSTSGGSSNDNAYFGYSTPWGYFDFNRFHCHFSPRDWQRLINNNWGFRPKRLNFKLFNIQVKEVTDNNGVKTIANNLTSTVQVFADSDYQLPYVLGSAHEGCLPPFPADVFMIPQYGYLTLNDGSQAVGRSSFYCLEYFPSQMLRTGNNFQFSYEFENVPFHSSYAHSQSLDRLMNPLIDQYLYYLSKTINGSGQNQQTLKFSVAGPSNMAVQGRNYIPGPSYRQQRVSTTVTQNNNSEFAWPGASSWALNGRNSLMNPGPAMASHKEGEDRFFPLSGSLIFGKQGTGRDNVDADKVMITNEEEIKTTNPVATESYGQVATNHQSAQAQAQTGWVQNQGILPGMVWQDRDVYLQGPIWAKIPHTDGNFHPSPLMGGFGMKHPPPQILIKNTPVPADPPTAFNKDKLNSFITQYSTGQVSVEIEWELQKENSKRWNPEIQYTSNYCKSNNVEFAVNTEGVYSEPRPIGTRYLTRNL

SEQ ID NO: 288 - protein, 736 aa, synthetic construct; identical to SEQ ID NO: 195

SEQ ID NO: 289 - protein, 736 aa, synthetic construct
MAADGYLPDWLEDNLSEGIREWWALKPGAPQPKANQQHQDNARGLVLPGYKYLGPGNGLDKGEPVNAADAAALEHDKAYDQQLKAGDNPYLKYNHADAEFQERLKEDTSFGGNLGRAVFQAKKRLLEPLGLVEEAAKTAPGKKRPVEQSPQEPDSSAGIGKSGAQPAKKRLNFGQTGDTESVPDPQPIGEPPAAPSGVGSLTMASGGGAPVADNNEGADGVGSSSGNWHCDSQWLGDRVITTSTRTWALPTYNNHLYKQISNSTSGGSSNDNAYFGYSTPWGYFDFNRFHCHFSPRDWQRLINNNWGFRPKRLNFKLFNIQVKEVTDNNGVKTIANNLTSTVQVFADSDYQLPYVLGSAHEGCLPPFPADVFMIPQYGYLTLNDGSQAVGRSSFYCLEYFPSQMLRTGNNFQFSYEFENVPFHSSYAHSQSLDRLMNPLIDQYLYYLSKTINGSGQNQQTLKFSVAGPSNMAVQGRNYIPGPSYRQQRVSTTVTQNNNSEIAWPGASSWALNGRNSLMNPGPAMASHKEGEDRFFPLSGSLIFGKQGTGRDNVDADKVMITNEEEIKTTNPVATESYGQVATNHQSAQAQAQTGWVQNQGILPGMVWQDRDVYLQGPIWAKIPHTDGNFHPSPLMGGFGMKHPPPQILIKNTPVPADPPTAFNKDKLNSFITQYSTGQVSVEIEWELQKENSKRWNPEIQYTSNYCKSNNVEFAVNTEGVYSEPRPIGTRYLTRNL

SEQ ID NO: 290 - protein, 736 aa, synthetic construct; identical to SEQ ID NO: 196

SEQ ID NO: 291 - protein, 736 aa, synthetic construct; identical to SEQ ID NO: 197

SEQ ID NO: 292 - protein, 736 aa, synthetic construct
MAADGYLPDWLEDTLSEGIRQWWKLKPGPPPPKPAERHKDDSRGLVLPGYKYLGPGNGLDKGEPVNAADAAALEHDKAYDQQLKAGDNPYLKYNHADAEFQERLKEDTSFGGNLGRAVFQAKKRLLEPLGLVEEAAKTAPGKKRPVEQSPQEPDSSAGIGKSGSQPAKKKLNFGQTGDTESVPDPQPIGEPPAAPSGVGSLTMASGGGAPVADNNEGADGVGSSSGNWHCDSQWLGDRVITTSTRTWALPTYNNHLYKQISNSTSGGSSNDNAYFGYSTPWGYFDFNRFHCHFSPRDWQRLINNNWGFRPKRLNFKLFNIQVKEVTDNNGVKTIANNLTSTVQVFTDSDYQLPYVLGSAHEGCLPPFPADVFMIPQYGYLTLNDGSQAVGRSSFYCLEYFPSQMLRTGNNFQFSYEFENVPFHSSYAHSQSLDRLMNPLIDQYLYYLSKTINGSGQNQQTLKFSVAGPSNMAVQGRNYIPGPSYRQQRVSTTVTQNNNSEIAWPGASSWALNGRNSLMNPGPAMASHKEGEDRFFPLSGSLIFGKQGTGRDNVDADKVMITNEEEIKTTNPVATESYGQVATNHQSAQAQAQTGWVQNQGILPGMVWQDRDVYLQGPIWAKIPHTDGNFHPSPLMGGFGMKHPPPQILIKNTPVPADPPTAFNKDKLNSFITQYSTGQVSVEIEWELQKENSKRWNPEIQYTSNYYKSNNVEFAVNTEGVYSEPRPIGTRYLTRNL

SEQ ID NO: 293 - protein, 736 aa, synthetic construct
MAADGYLPDWLEDTLSEGIRQWWKLKPGPPPPKPAERHKDDSRGLVLPGYKYLGPGNGLDKGEPVNAADAAALEHDKAYDQQLKAGDNPYLKYNHADAEFQERLKEDTSFGGNLGRAVFQAKKRLLEPLGLVEEAAKTAPGKKRPVEQSPQEPDSSAGIGKSGSQPAKKKLNFGQTGDTESVPDPQPIGEPPAAPSGVGSLTMASGGGAPVADNNEGADGVGSSSGNWHCDSQWLGDRVITTSTRTWALPTYNNHLYKQISNSTSGGSSNDNAYFGYSTPWGYFDFNRFHCHFSPRDWQRLINNNWGFRPKRLNFKLFNIQVKEVTDNNGVKTIANNLTSTVQVFTDSDYQLPYVLGSAHEGCLPPFPADVFMIPQYGYLTLNDGSQAVGRSSFYCLEYFPSQMLRTGNNFQFSYEFENVPFHSSYAHSQSLDRLMNPLIDQYLYYLSKTINGSGQNQQTLKFSVAGPSNMAVQGRNYIPGPSYRQQRVSTTVTQNNNSEFAWPRASSWALNGRNSLMNPGPAMASHKEGEDRFFPLSGSLIFGKQGTGRDNVDADKVMITNEEEIKTTNPVATESYGQVATNHQSAQAQAQTGWVQNQGILPGMVWQDRDVYLQGPIWAKIPHTDGNFHPSPLMGGFGMKHPPPQILIKNTPVPADPPTAFNKDKLNSFITQYSTGQVSVEIEWELQKENSKRWNPEIQYTSNYYKSNNVEFAVNTEGVYSEPRPIGTRYLTRNL

SEQ ID NO: 294 - protein, 736 aa, synthetic construct
MAADGYLPDWLEDTLSEGIRQWWKLKPGPPPPKPAERHKDDSRGLVLPGYKYLGPGNGLDKGEPVNAADAAALEHDKAYDQQLKAGDNPYLKYNHADAEFQERLKEDTSFGGNLGRAVFQAKKRLLEPLGLVEEAAKTAPGKKRPVEQSPQEPDSSAGIGKSGSQPAKKKLNFGQTGDTESVPDPQPIGEPPAAPSGVGSLTMASGGGAPVADNNEGADGVGSSSGNWHCDSQWLGDRVITTSTRTWALPTYNNHLYKQISNSTSGGSSNDNAYFGYSTPWGYFDFNRFHCHFSPRDWQRLINNNWGFRPKRLNFKLFNIQVKEVTDNNGVKTIANNLTSTVQVFTDSDYQLPYVLGSAHEGCLPPFPADVFMIPQYGYLTLNDGSQAVGRSSFYCLEYFPSQMLRTGNNFQFSYEFENVPFHSSYAHSQSLDRLMNPLIDQYLYYLSKTINGSGQNQQTLKFSVAGPSNMAVQGRNYIPGPSYRQQRVSTTVTQNNNSEFAWPGASSWALNGRNSLMNPGPAMASHKEGEDRFFPLSGSLIFGKQGTGRDNVDADKVMITNEEEIKTTNPVATESYGQVATNHQSAQAQAQTGWVQNQGILPGMVWQDRDVYLQGPIWAKIPHTDGNFHPSPLMGGFGMKHPPPQILIKNTPVPADPPTAFNKDKLNSFITQYSTGQVSVEIEWELQKENSKRWNPEIQYTSNYCKSNNVEFAVNTEGVYSEPRPIGTRYLTRNL

SEQ ID NO: 295 - protein, 736 aa, synthetic construct
MAADGYLPDWLEDTLSEGIRQWWKLKPGPPPPKPAERHKDDSRGLVLPGYKYLGPGNGLDKGEPVNAADAAALEHDKAYDQQLKAGDNPYLKYNHADAEFQERLKEDTSFGGNLGRAVFQAKKRLLEPLGLVEEAAKTAPGKKRPVEQSPQEPDSSAGIGKSGSQPAKKKLNFGQTGDTESVPDPQPIGEPPAAPSGVGSLTMASGGGAPVADNNEGADGVGSSSGNWHCDSQWLGDRVITTSTRTWALPTYNNHLYKQISNSTSGGSSNDNAYFGYSTPWGYFDFNRFHCHFSPRDWQRLINNNWGFRPKRLNFKLFNIQVKEVTDNNGVKTIANNLTSTVQVFTDSDYQLPYVLGSAHEGCLPPFPADVFMIPQYGYLTLNDGSQAVGRSSFYCLEYFPSQMLRTGNNFQFSYEFENVPFHSSYAHSQSLDRLMNPLIDQYLYYLSKTINGSGQNQQTLKFSVAGPSNMAVQGRNYIPGPSYRQQRVSTTVTQNNNSEIAWPRASSWALNGRNSLMNPGPAMASHKEGEDRFFPLSGSLIFGKQGTGRDNVDADKVMITNEEEIKTTNPVATESYGQVATNHQSAQAQAQTGWVQNQGILPGMVWQDRDVYLQGPIWAKIPHTDGNFHPSPLMGGFGMKHPPPQILIKNTPVPADPPTAFNKDKLNSFITQYSTGQVSVEIEWELQKENSKRWNPEIQYTSNYYKSNNVEFAVNTEGVYSEPRPIGTRYLTRNL

SEQ ID NO: 296 - protein, 736 aa, synthetic construct
MAADGYLPDWLEDTLSEGIRQWWKLKPGPPPPKPAERHKDDSRGLVLPGYKYLGPGNGLDKGEPVNAADAAALEHDKAYDQQLKAGDNPYLKYNHADAEFQERLKEDTSFGGNLGRAVFQAKKRLLEPLGLVEEAAKTAPGKKRPVEQSPQEPDSSAGIGKSGSQPAKKKLNFGQTGDTESVPDPQPIGEPPAAPSGVGSLTMASGGGAPVADNNEGADGVGSSSGNWHCDSQWLGDRVITTSTRTWALPTYNNHLYKQISNSTSGGSSNDNAYFGYSTPWGYFDFNRFHCHFSPRDWQRLINNNWGFRPKRLNFKLFNIQVKEVTDNNGVKTIANNLTSTVQVFTDSDYQLPYVLGSAHEGCLPPFPADVFMIPQYGYLTLNDGSQAVGRSSFYCLEYFPSQMLRTGNNFQFSYEFENVPFHSSYAHSQSLDRLMNPLIDQYLYYLSKTINGSGQNQQTLKFSVAGPSNMAVQGRNYIPGPSYRQQRVSTTVTQNNNSEIAWPGASSWALNGRNSLMNPGPAMASHKEGEDRFFPLSGSLIFGKQGTGRDNVDADKVMITNEEEIKTTNPVATESYGQVATNHQSAQAQAQTGWVQNQGILPGMVWQDRDVYLQGPIWAKIPHTDGNFHPSPLMGGFGMKHPPPQILIKNTPVPADPPTAFNKDKLNSFITQYSTGQVSVEIEWELQKENSKRWNPEIQYTSNYCKSNNVEFAVNTEGVYSEPRPIGTRYLTRNL

SEQ ID NO: 297 - protein, 736 aa, synthetic construct
MAADGYLPDWLEDTLSEGIRQWWKLKPGPPPPKPAERHKDDSRGLVLPGYKYLGPGNGLDKGEPVNAADAAALEHDKAYDQQLKAGDNPYLKYNHADAEFQERLKEDTSFGGNLGRAVFQAKKRLLEPLGLVEEAAKTAPGKKRPVEQSPQEPDSSAGIGKSGSQPAKKKLNFGQTGDTESVPDPQPIGEPPAAPSGVGSLTMASGGGAPVADNNEGADGVGSSSGNWHCDSQWLGDRVITTSTRTWALPTYNNHLYKQISNSTSGGSSNDNAYFGYSTPWGYFDFNRFHCHFSPRDWQRLINNNWGFRPKRLNFKLFNIQVKEVTDNNGVKTIANNLTSTVQVFTDSDYQLPYVLGSAHEGCLPPFPADVFMIPQYGYLTLNDGSQAVGRSSFYCLEYFPSQMLRTGNNFQFSYEFENVPFHSSYAHSQSLDRLMNPLIDQYLYYLSKTINGSGQNQQTLKFSVAGPSNMAVQGRNYIPGPSYRQQRVSTTVTQNNNSEFAWPRASSWALNGRNSLMNPGPAMASHKEGEDRFFPLSGSLIFGKQGTGRDNVDADKVMITNEEEIKTTNPVATESYGQVATNHQSAQAQAQTGWVQNQGILPGMVWQDRDVYLQGPIWAKIPHTDGNFHPSPLMGGFGMKHPPPQILIKNTPVPADPPTAFNKDKLNSFITQYSTGQVSVEIEWELQKENSKRWNPEIQYTSNYCKSNNVEFAVNTEGVYSEPRPIGTRYLTRNL

SEQ ID NO: 298 - protein, 736 aa, synthetic construct
MAADGYLPDWLEDTLSEGIRQWWKLKPGPPPPKPAERHKDDSRGLVLPGYKYLGPGNGLDKGEPVNAADAAALEHDKAYDQQLKAGDNPYLKYNHADAEFQERLKEDTSFGGNLGRAVFQAKKRLLEPLGLVEEAAKTAPGKKRPVEQSPQEPDSSAGIGKSGSQPAKKKLNFGQTGDTESVPDPQPIGEPPAAPSGVGSLTMASGGGAPVADNNEGADGVGSSSGNWHCDSQWLGDRVITTSTRTWALPTYNNHLYKQISNSTSGGSSNDNAYFGYSTPWGYFDFNRFHCHFSPRDWQRLINNNWGFRPKRLNFKLFNIQVKEVTDNNGVKTIANNLTSTVQVFTDSDYQLPYVLGSAHEGCLPPFPADVFMIPQYGYLTLNDGSQAVGRSSFYCLEYFPSQMLRTGNNFQFSYEFENVPFHSSYAHSQSLDRLMNPLIDQYLYYLSKTINGSGQNQQTLKFSVAGPSNMAVQGRNYIPGPSYRQQRVSTTVTQNNNSEIAWPRASSWALNGRNSLMNPGPAMASHKEGEDRFFPLSGSLIFGKQGTGRDNVDADKVMITNEEEIKTTNPVATESYGQVATNHQSAQAQAQTGWVQNQGILPGMVWQDRDVYLQGPIWAKIPHTDGNFHPSPLMGGFGMKHPPPQILIKNTPVPADPPTAFNKDKLNSFITQYSTGQVSVEIEWELQKENSKRWNPEIQYTSNYCKSNNVEFAVNTEGVYSEPRPIGTRYLTRNL

SEQ ID NO: 299 - protein, 736 aa, synthetic construct
MAADGYLPDWLEDTLSEGIRQWWKLKPGPPPPKPAERHKDDSRGLVLPGYKYLGPGNGLDKGEPVNAADAAALEHDKAYDQQLKAGDNPYLKYNHADAEFQERLKEDTSFGGNLGRAVFQAKKRLLEPLGLVEEAAKTAPGKKRPVEQSPQEPDSSAGIGKSGSQPAKKKLNFGQTGDTESVPDPQPIGEPPAAPSGVGSLTMASGGGAPVADNNEGADGVGSSSGNWHCDSQWLGDRVITTSTRTWALPTYNNHLYKQISNSTSGGSSNDNAYFGYSTPWGYFDFNRFHCHFSPRDWQRLINNNWGFRPKRLNFKLFNIQVKEVTDNNGVKTIANNLTSTVQVFADSDYQLPYVLGSAHEGCLPPFPADVFMIPQYGYLTLNDGSQAVGRSSFYCLEYFPSQMLRTGNNFQFSYEFENVPFHSSYAHSQSLDRLMNPLIDQYLYYLSKTINGSGQNQQTLKFSVAGPSNMAVQGRNYIPGPSYRQQRVSTTVTQNNNSEFAWPGASSWALNGRNSLMNPGPAMASHKEGEDRFFPLSGSLIFGKQGTGRDNVDADKVMITNEEEIKTTNPVATESYGQVATNHQSAQAQAQTGWVQNQGILPGMVWQDRDVYLQGPIWAKIPHTDGNFHPSPLMGGFGMKHPPPQILIKNTPVPADPPTAFNKDKLNSFITQYSTGQVSVEIEWELQKENSKRWNPEIQYTSNYYKSNNVEFAVNTEGVYSEPRPIGTRYLTRNL

SEQ ID NO: 300 - protein, 736 aa, synthetic construct
MAADGYLPDWLEDTLSEGIRQWWKLKPGPPPPKPAERHKDDSRGLVLPGYKYLGPGNGLDKGEPVNAADAAALEHDKAYDQQLKAGDNPYLKYNHADAEFQERLKEDTSFGGNLGRAVFQAKKRLLEPLGLVEEAAKTAPGKKRPVEQSPQEPDSSAGIGKSGSQPAKKKLNFGQTGDTESVPDPQPIGEPPAAPSGVGSLTMASGGGAPVADNNEGADGVGSSSGNWHCDSQWLGDRVITTSTRTWALPTYNNHLYKQISNSTSGGSSNDNAYFGYSTPWGYFDFNRFHCHFSPRDWQRLINNNWGFRPKRLNFKLFNIQVKEVTDNNGVKTIANNLTSTVQVFADSDYQLPYVLGSAHEGCLPPFPADVFMIPQYGYLTLNDGSQAVGRSSFYCLEYFPSQMLRTGNNFQFSYEFENVPFHSSYAHSQSLDRLMNPLIDQYLYYLSKTINGSGQNQQTLKFSVAGPSNMAVQGRNYIPGPSYRQQRVSTTVTQNNNSEIAWPGASSWALNGRNSLMNPGPAMASHKEGEDRFFPLSGSLIFGKQGTGRDNVDADKVMITNEEEIKTTNPVATESYGQVATNHQSAQAQAQTGWVQNQGILPGMVWQDRDVYLQGPIWAKIPHTDGNFHPSPLMGGFGMKHPPPQILIKNTPVPADPPTAFNKDKLNSFITQYSTGQVSVEIEWELQKENSKRWNPEIQYTSNYYKSNNVEFAVNTEGVYSEPRPIGTRYLTRNL

SEQ ID NO: 301 - protein, 736 aa, synthetic construct
MAADGYLPDWLEDTLSEGIRQWWKLKPGPPPPKPAERHKDDSRGLVLPGYKYLGPGNGLDKGEPVNAADAAALEHDKAYDQQLKAGDNPYLKYNHADAEFQERLKEDTSFGGNLGRAVFQAKKRLLEPLGLVEEAAKTAPGKKRPVEQSPQEPDSSAGIGKSGSQPAKKKLNFGQTGDTESVPDPQPIGEPPAAPSGVGSLTMASGGGAPVADNNEGADGVGSSSGNWHCDSQWLGDRVITTSTRTWALPTYNNHLYKQISNSTSGGSSNDNAYFGYSTPWGYFDFNRFHCHFSPRDWQRLINNNWGFRPKRLNFKLFNIQVKEVTDNNGVKTIANNLTSTVQVFADSDYQLPYVLGSAHEGCLPPFPADVFMIPQYGYLTLNDGSQAVGRSSFYCLEYFPSQMLRTGNNFQFSYEFENVPFHSSYAHSQSLDRLMNPLIDQYLYYLSKTINGSGQNQQTLKFSVAGPSNMAVQGRNYIPGPSYRQQRVSTTVTQNNNSEFAWPRASSWALNGRNSLMNPGPAMASHKEGEDRFFPLSGSLIFGKQGTGRDNVDADKVMITNEEEIKTTNPVATESYGQVATNHQSAQAQAQTGWVQNQGILPGMVWQDRDVYLQGPIWAKIPHTDGNFHPSPLMGGFGMKHPPPQILIKNTPVPADPPTAFNKDKLNSFITQYSTGQVSVEIEWELQKENSKRWNPEIQYTSNYYKSNNVEFAVNTEGVYSEPRPIGTRYLTRNL

SEQ ID NO: 302 - protein, 736 aa, synthetic construct
MAADGYLPDWLEDTLSEGIRQWWKLKPGPPPPKPAERHKDDSRGLVLPGYKYLGPGNGLDKGEPVNAADAAALEHDKAYDQQLKAGDNPYLKYNHADAEFQERLKEDTSFGGNLGRAVFQAKKRLLEPLGLVEEAAKTAPGKKRPVEQSPQEPDSSAGIGKSGSQPAKKKLNFGQTGDTESVPDPQPIGEPPAAPSGVGSLTMASGGGAPVADNNEGADGVGSSSGNWHCDSQWLGDRVITTSTRTWALPTYNNHLYKQISNSTSGGSSNDNAYFGYSTPWGYFDFNRFHCHFSPRDWQRLINNNWGFRPKRLNFKLFNIQVKEVTDNNGVKTIANNLTSTVQVFADSDYQLPYVLGSAHEGCLPPFPADVFMIPQYGYLTLNDGSQAVGRSSFYCLEYFPSQMLRTGNNFQFSYEFENVPFHSSYAHSQSLDRLMNPLIDQYLYYLSKTINGSGQNQQTLKFSVAGPSNMAVQGRNYIPGPSYRQQRVSTTVTQNNNSEFAWPGASSWALNGRNSLMNPGPAMASHKEGEDRFFPLSGSLIFGKQGTGRDNVDADKVMITNEEEIKTTNPVATESYGQVATNHQSAQAQAQTGWVQNQGILPGMVWQDRDVYLQGPIWAKIPHTDGNFHPSPLMGGFGMKHPPPQILIKNTPVPADPPTAFNKDKLNSFITQYSTGQVSVEIEWELQKENSKRWNPEIQYTSNYCKSNNVEFAVNTEGVYSEPRPIGTRYLTRNL

SEQ ID NO: 303 - protein, 736 aa, synthetic construct
MAADGYLPDWLEDTLSEGIRQWWKLKPGPPPPKPAERHKDDSRGLVLPGYKYLGPGNGLDKGEPVNAADAAALEHDKAYDQQLKAGDNPYLKYNHADAEFQERLKEDTSFGGNLGRAVFQAKKRLLEPLGLVEEAAKTAPGKKRPVEQSPQEPDSSAGIGKSGSQPAKKKLNFGQTGDTESVPDPQPIGEPPAAPSGVGSLTMASGGGAPVADNNEGADGVGSSSGNWHCDSQWLGDRVITTSTRTWALPTYNNHLYKQISNSTSGGSSNDNAYFGYSTPWGYFDFNRFHCHFSPRDWQRLINNNWGFRPKRLNFKLFNIQVKEVTDNNGVKTIANNLTSTVQVFADSDYQLPYVLGSAHEGCLPPFPADVFMIPQYGYLTLNDGSQAVGRSSFYCLEYFPSQMLRTGNNFQFSYEFENVPFHSSYAHSQSLDRLMNPLIDQYLYYLSKTINGSGQNQQTLKFSVAGPSNMAVQGRNYIPGPSYRQQRVSTTVTQNNNSEIAWPRASSWALNGRNSLMNPGPAMASHKEGEDRFFPLSGSLIFGKQGTGRDNVDADKVMITNEEEIKTTNPVATESYGQVATNHQSAQAQAQTGWVQNQGILPGMVWQDRDVYLQGPIWAKIPHTDGNFHPSPLMGGFGMKHPPPQILIKNTPVPADPPTAFNKDKLNSFITQYSTGQVSVEIEWELQKENSKRWNPEIQYTSNYYKSNNVEFAVNTEGVYSEPRPIGTRYLTRNL

SEQ ID NO: 304 - protein, 736 aa, synthetic construct
MAADGYLPDWLEDTLSEGIRQWWKLKPGPPPPKPAERHKDDSRGLVLPGYKYLGPGNGLDKGEPVNAADAAALEHDKAYDQQLKAGDNPYLKYNHADAEFQERLKEDTSFGGNLGRAVFQAKKRLLEPLGLVEEAAKTAPGKKRPVEQSPQEPDSSAGIGKSGSQPAKKKLNFGQTGDTESVPDPQPIGEPPAAPSGVGSLTMASGGGAPVADNNEGADGVGSSSGNWHCDSQWLGDRVITTSTRTWALPTYNNHLYKQISNSTSGGSSNDNAYFGYSTPWGYFDFNRFHCHFSPRDWQRLINNNWGFRPKRLNFKLFNIQVKEVTDNNGVKTIANNLTSTVQVFADSDYQLPYVLGSAHEGCLPPFPADVFMIPQYGYLTLNDGSQAVGRSSFYCLEYFPSQMLRTGNNFQFSYEFENVPFHSSYAHSQSLDRLMNPLIDQYLYYLSKTINGSGQNQQTLKFSVAGPSNMAVQGRNYIPGPSYRQQRVSTTVTQNNNSEIAWPGASSWALNGRNSLMNPGPAMASHKEGEDRFFPLSGSLIFGKQGTGRDNVDADKVMITNEEEIKTTNPVATESYGQVATNHQSAQAQAQTGWVQNQGILPGMVWQDRDVYLQGPIWAKIPHTDGNFHPSPLMGGFGMKHPPPQILIKNTPVPADPPTAFNKDKLNSFITQYSTGQVSVEIEWELQKENSKRWNPEIQYTSNYCKSNNVEFAVNTEGVYSEPRPIGTRYLTRNL

SEQ ID NO: 305 - protein, 736 aa, synthetic construct
MAADGYLPDWLEDTLSEGIRQWWKLKPGPPPPKPAERHKDDSRGLVLPGYKYLGPGNGLDKGEPVNAADAAALEHDKAYDQQLKAGDNPYLKYNHADAEFQERLKEDTSFGGNLGRAVFQAKKRLLEPLGLVEEAAKTAPGKKRPVEQSPQEPDSSAGIGKSGSQPAKKKLNFGQTGDTESVPDPQPIGEPPAAPSGVGSLTMASGGGAPVADNNEGADGVGSSSGNWHCDSQWLGDRVITTSTRTWALPTYNNHLYKQISNSTSGGSSNDNAYFGYSTPWGYFDFNRFHCHFSPRDWQRLINNNWGFRPKRLNFKLFNIQVKEVTDNNGVKTIANNLTSTVQVFADSDYQLPYVLGSAHEGCLPPFPADVFMIPQYGYLTLNDGSQAVGRSSFYCLEYFPSQMLRTGNNFQFSYEFENVPFHSSYAHSQSLDRLMNPLIDQYLYYLSKTINGSGQNQQTLKFSVAGPSNMAVQGRNYIPGPSYRQQRVSTTVTQNNNSEFAWPRASSWALNGRNSLMNPGPAMASHKEGEDRFFPLSGSLIFGKQGTGRDNVDADKVMITNEEEIKTTNPVATESYGQVATNHQSAQAQAQTGWVQNQGILPGMVWQDRDVYLQGPIWAKIPHTDGNFHPSPLMGGFGMKHPPPQILIKNTPVPADPPTAFNKDKLNSFITQYSTGQVSVEIEWELQKENSKRWNPEIQYTSNYCKSNNVEFAVNTEGVYSEPRPIGTRYLTRNL

SEQ ID NO: 306 - protein, 736 aa, synthetic construct
MAADGYLPDWLEDTLSEGIRQWWKLKPGPPPPKPAERHKDDSRGLVLPGYKYLGPGNGLDKGEPVNAADAAALEHDKAYDQQLKAGDNPYLKYNHADAEFQERLKEDTSFGGNLGRAVFQAKKRLLEPLGLVEEAAKTAPGKKRPVEQSPQEPDSSAGIGKSGSQPAKKKLNFGQTGDTESVPDPQPIGEPPAAPSGVGSLTMASGGGAPVADNNEGADGVGSSSGNWHCDSQWLGDRVITTSTRTWALPTYNNHLYKQISNSTSGGSSNDNAYFGYSTPWGYFDFNRFHCHFSPRDWQRLINNNWGFRPKRLNFKLFNIQVKEVTDNNGVKTIANNLTSTVQVFADSDYQLPYVLGSAHEGCLPPFPADVFMIPQYGYLTLNDGSQAVGRSSFYCLEYFPSQMLRTGNNFQFSYEFENVPFHSSYAHSQSLDRLMNPLIDQYLYYLSKTINGSGQNQQTLKFSVAGPSNMAVQGRNYIPGPSYRQQRVSTTVTQNNNSEIAWPRASSWALNGRNSLMNPGPAMASHKEGEDRFFPLSGSLIFGKQGTGRDNVDADKVMITNEEEIKTTNPVATESYGQVATNHQSAQAQAQTGWVQNQGILPGMVWQDRDVYLQGPIWAKIPHTDGNFHPSPLMGGFGMKHPPPQILIKNTPVPADPPTAFNKDKLNSFITQYSTGQVSVEIEWELQKENSKRWNPEIQYTSNYCKSNNVEFAVNTEGVYSEPRPIGTRYLTRNL

SEQ ID NO: 307 - protein, 738 aa, synthetic construct
MAADGYLPDWLEDNLSEGIREWWDLKPGAPKPKANQQKQDDGRGLVLPGYKYLGPFNGLDKGEPVNAADAAALEHDKAYDQQLKAGDNPYLRYNHADAEFQERLQEDTSFGGNLGRAVFQAKKRVLEPLGLVEEAAKTAPGKKRPVEPSPQRSPDSSTGIGKKGQQPAKKRLNFGQTGDSESVPDPQPIGEPPAGPSGLGSGTMAAGGGAPMADNNEGADGVGSSSGNWHCDSTWLGDRVITTSTRTWALPTYNNHLYKQISNGTSGGSTNDNTYFGYSTPWGYFDFNRFHCHFSPRDWQRLINNNWGFRPKRLSFKLFNIQVKEVTQNEGTKTIANNLTSTIQVFTDSEYQLPYVLGSAHQGCLPPFPADVFMIPQYGYLTLNNGSQAVGRSSFYCLEYFPSQMLRTGNNFEFSYTFEDVPFHSSYAHSQSLDRLMNPLIDQYLYYLSRTQSTGGTQGTQQLLFSQAGPANMSAQAKNWLPGPCYRQQRVSTTLSQNNNSNIAWTGATKYHLNGRDSLVNPGVAMATHKDDEERFFPSSGVLMFGKQGAGRDNVDYSSVMLTSEEEIKTTNPVATEQYGVVADNLQQTNTGPIVGNVNSQGALPGMVWQNRDVYLQGPIWAKIPHTDGNFHPSPLMGGFGLKHPPPQILIKNTPVPADPPTTFSQAKLASFITQYSTGQVSVEIEWELQKENSKRWNPEIQYTSNYYKSTNVDFAVNTEGTYSEPRPIGTRYLTRNL

SEQ ID NO: 308 - protein, 738 aa, synthetic construct
MAADGYLPDWLEDNLSEGIREWWDLKPGAPKPKANQQKQDDGRGLVLPGYKYLGPFNGLDKGEPVNAADAAALEHDKAYDQQLKAGDNPYLRYNHADAEFQERLQEDTSFGGNLGRAVFQAKKRVLEPLGLVEEAAKTAPGKKRPVEPSPQRSPDSSTGIGKKGQQPAKKRLNFGQTGDSESVPDPQPIGEPPAGPSGLGSGTMAAGGGAPMADNNEGADGVGSSSGNWHCDSTWLGDRVITTSTRTWALPTYNNHLYKQISNGTSGGSTNDNTYFGYSTPWGYFDFNRFHCHFSPRDWQRLINNNWGFRPKRLSFKLFNIQVKEVTQNEGTKTIANNLTSTIQVFTDSEYQLPYVLGSAHQGCLPPFPADVFMIPQYGYLTLNNGSQAVGRSSFYCLEYFPSQMLRTGNNFEFSYTFEDVPFHSSYAHSQSLDRLMNPLIDQYLYYLSRTQSTGGTQGTQQLLFSQAGPANMSAQAKNWLPGPCYRQQRVSTTLSQNNNSNFAWTRATKYHLNGRDSLVNPGVAMATHKDDEERFFPSSGVLMFGKQGAGRDNVDYSSVMLTSEEEIKTTNPVATEQYGVVADNLQQTNTGPIVGNVNSQGALPGMVWQNRDVYLQGPIWAKIPHTDGNFHPSPLMGGFGLKHPPPQILIKNTPVPADPPTTFSQAKLASFITQYSTGQVSVEIEWELQKENSKRWNPEIQYTSNYYKSTNVDFAVNTEGTYSEPRPIGTRYLTRNL

SEQ ID NO: 309 - protein, 738 aa, synthetic construct
MAADGYLPDWLEDNLSEGIREWWDLKPGAPKPKANQQKQDDGRGLVLPGYKYLGPFNGLDKGEPVNAADAAALEHDKAYDQQLKAGDNPYLRYNHADAEFQERLQEDTSFGGNLGRAVFQAKKRVLEPLGLVEEAAKTAPGKKRPVEPSPQRSPDSSTGIGKKGQQPAKKRLNFGQTGDSESVPDPQPIGEPPAGPSGLGSGTMAAGGGAPMADNNEGADGVGSSSGNWHCDSTWLGDRVITTSTRTWALPTYNNHLYKQISNGTSGGSTNDNTYFGYSTPWGYFDFNRFHCHFSPRDWQRLINNNWGFRPKRLSFKLFNIQVKEVTQNEGTKTIANNLTSTIQVFTDSEYQLPYVLGSAHQGCLPPFPADVFMIPQYGYLTLNNGSQAVGRSSFYCLEYFPSQMLRTGNNFEFSYTFEDVPFHSSYAHSQSLDRLMNPLIDQYLYYLSRTQSTGGTQGTQQLLFSQAGPANMSAQAKNWLPGPCYRQQRVSTTLSQNNNSNFAWTGATKYHLNGRDSLVNPGVAMATHKDDEERFFPSSGVLMFGKQGAGRDNVDYSSVMLTSEEEIKTTNPVATEQYGVVADNLQQTNTGPIVGNVNSQGALPGMVWQNRDVYLQGPIWAKIPHTDGNFHPSPLMGGFGLKHPPPQILIKNTPVPADPPTTFSQAKLASFITQYSTGQVSVEIEWELQKENSKRWNPEIQYTSNYCKSTNVDFAVNTEGTYSEPRPIGTRYLTRNL

SEQ ID NO: 310 - protein, 738 aa, synthetic construct
MAADGYLPDWLEDNLSEGIREWWDLKPGAPKPKANQQKQDDGRGLVLPGYKYLGPFNGLDKGEPVNAADAAALEHDKAYDQQLKAGDNPYLRYNHADAEFQERLQEDTSFGGNLGRAVFQAKKRVLEPLGLVEEAAKTAPGKKRPVEPSPQRSPDSSTGIGKKGQQPAKKRLNFGQTGDSESVPDPQPIGEPPAGPSGLGSGTMAAGGGAPMADNNEGADGVGSSSGNWHCDSTWLGDRVITTSTRTWALPTYNNHLYKQISNGTSGGSTNDNTYFGYSTPWGYFDFNRFHCHFSPRDWQRLINNNWGFRPKRLSFKLFNIQVKEVTQNEGTKTIANNLTSTIQVFTDSEYQLPYVLGSAHQGCLPPFPADVFMIPQYGYLTLNNGSQAVGRSSFYCLEYFPSQMLRTGNNFEFSYTFEDVPFHSSYAHSQSLDRLMNPLIDQYLYYLSRTQSTGGTQGTQQLLFSQAGPANMSAQAKNWLPGPCYRQQRVSTTLSQNNNSNIAWTRATKYHLNGRDSLVNPGVAMATHKDDEERFFPSSGVLMFGKQGAGRDNVDYSSVMLTSEEEIKTTNPVATEQYGVVADNLQQTNTGPIVGNVNSQGALPGMVWQNRDVYLQGPIWAKIPHTDGNFHPSPLMGGFGLKHPPPQILIKNTPVPADPPTTFSQAKLASFITQYSTGQVSVEIEWELQKENSKRWNPEIQYTSNYYKSTNVDFAVNTEGTYSEPRPIGTRYLTRNL

SEQ ID NO: 311 - protein, 738 aa, synthetic construct
MAADGYLPDWLEDNLSEGIREWWDLKPGAPKPKANQQKQDDGRGLVLPGYKYLGPFNGLDKGEPVNAADAAALEHDKAYDQQLKAGDNPYLRYNHADAEFQERLQEDTSFGGNLGRAVFQAKKRVLEPLGLVEEAAKTAPGKKRPVEPSPQRSPDSSTGIGKKGQQPAKKRLNFGQTGDSESVPDPQPIGEPPAGPSGLGSGTMAAGGGAPMADNNEGADGVGSSSGNWHCDSTWLGDRVITTSTRTWALPTYNNHLYKQISNGTSGGSTNDNTYFGYSTPWGYFDFNRFHCHFSPRDWQRLINNNWGFRPKRLSFKLFNIQVKEVTQNEGTKTIANNLTSTIQVFTDSEYQLPYVLGSAHQGCLPPFPADVFMIPQYGYLTLNNGSQAVGRSSFYCLEYFPSQMLRTGNNFEFSYTFEDVPFHSSYAHSQSLDRLMNPLIDQYLYYLSRTQSTGGTQGTQQLLFSQAGPANMSAQAKNWLPGPCYRQQRVSTTLSQNNNSNIAWTGATKYHLNGRDSLVNPGVAMATHKDDEERFFPSSGVLMFGKQGAGRDNVDYSSVMLTSEEEIKTTNPVATEQYGVVADNLQQTNTGPIVGNVNSQGALPGMVWQNRDVYLQGPIWAKIPHTDGNFHPSPLMGGFGLKHPPPQILIKNTPVPADPPTTFSQAKLASFITQYSTGQVSVEIEWELQKENSKRWNPEIQYTSNYCKSTNVDFAVNTEGTYSEPRPIGTRYLTRNL

SEQ ID NO: 312 - protein, 738 aa, synthetic construct
MAADGYLPDWLEDNLSEGIREWWDLKPGAPKPKANQQKQDDGRGLVLPGYKYLGPFNGLDKGEPVNAADAAALEHDKAYDQQLKAGDNPYLRYNHADAEFQERLQEDTSFGGNLGRAVFQAKKRVLEPLGLVEEAAKTAPGKKRPVEPSPQRSPDSSTGIGKKGQQPAKKRLNFGQTGDSESVPDPQPIGEPPAGPSGLGSGTMAAGGGAPMADNNEGADGVGSSSGNWHCDSTWLGDRVITTSTRTWALPTYNNHLYKQISNGTSGGSTNDNTYFGYSTPWGYFDFNRFHCHFSPRDWQRLINNNWGFRPKRLSFKLFNIQVKEVTQNEGTKTIANNLTSTIQVFTDSEYQLPYVLGSAHQGCLPPFPADVFMIPQYGYLTLNNGSQAVGRSSFYCLEYFPSQMLRTGNNFEFSYTFEDVPFHSSYAHSQSLDRLMNPLIDQYLYYLSRTQSTGGTQGTQQLLFSQAGPANMSAQAKNWLPGPCYRQQRVSTTLSQNNNSNFAWTRATKYHLNGRDSLVNPGVAMATHKDDEERFFPSSGVLMFGKQGAGRDNVDYSSVMLTSEEEIKTTNPVATEQYGVVADNLQQTNTGPIVGNVNSQGALPGMVWQNRDVYLQGPIWAKIPHTDGNFHPSPLMGGFGLKHPPPQILIKNTPVPADPPTTFSQAKLASFITQYSTGQVSVEIEWELQKENSKRWNPEIQYTSNYCKSTNVDFAVNTEGTYSEPRPIGTRYLTRNL

SEQ ID NO: 313 - protein, 738 aa, synthetic construct
MAADGYLPDWLEDNLSEGIREWWDLKPGAPKPKANQQKQDDGRGLVLPGYKYLGPFNGLDKGEPVNAADAAALEHDKAYDQQLKAGDNPYLRYNHADAEFQERLQEDTSFGGNLGRAVFQAKKRVLEPLGLVEEAAKTAPGKKRPVEPSPQRSPDSSTGIGKKGQQPAKKRLNFGQTGDSESVPDPQPIGEPPAGPSGLGSGTMAAGGGAPMADNNEGADGVGSSSGNWHCDSTWLGDRVITTSTRTWALPTYNNHLYKQISNGTSGGSTNDNTYFGYSTPWGYFDFNRFHCHFSPRDWQRLINNNWGFRPKRLSFKLFNIQVKEVTQNEGTKTIANNLTSTIQVFTDSEYQLPYVLGSAHQGCLPPFPADVFMIPQYGYLTLNNGSQAVGRSSFYCLEYFPSQMLRTGNNFEFSYTFEDVPFHSSYAHSQSLDRLMNPLIDQYLYYLSRTQSTGGTQGTQQLLFSQAGPANMSAQAKNWLPGPCYRQQRVSTTLSQNNNSNIAWTRATKYHLNGRDSLVNPGVAMATHKDDEERFFPSSGVLMFGKQGAGRDNVDYSSVMLTSEEEIKTTNPVATEQYGVVADNLQQTNTGPIVGNVNSQGALPGMVWQNRDVYLQGPIWAKIPHTDGNFHPSPLMGGFGLKHPPPQILIKNTPVPADPPTTFSQAKLASFITQYSTGQVSVEIEWELQKENSKRWNPEIQYTSNYCKSTNVDFAVNTEGTYSEPRPIGTRYLTRNL

SEQ ID NO: 314 - protein, 738 aa, synthetic construct
MAADGYLPDWLEDNLSEGIREWWDLKPGAPKPKANQQKQDDGRGLVLPGYKYLGPFNGLDKGEPVNAADAAALEHDKAYDQQLKAGDNPYLRYNHADAEFQERLQEDTSFGGNLGRAVFQAKKRVLEPLGLVEEAAKTAPGKKRPVEPSPQRSPDSSTGIGKKGQQPAKKRLNFGQTGDSESVPDPQPIGEPPAGPSGLGSGTMAAGGGAPMADNNEGADGVGSSSGNWHCDSTWLGDRVITTSTRTWALPTYNNHLYKQISNGTSGGSTNDNTYFGYSTPWGYFDFNRFHCHFSPRDWQRLINNNWGFRPKRLSFKLFNIQVKEVTQNEGTKTIANNLTSTIQVFADSEYQLPYVLGSAHQGCLPPFPADVFMIPQYGYLTLNNGSQAVGRSSFYCLEYFPSQMLRTGNNFEFSYTFEDVPFHSSYAHSQSLDRLMNPLIDQYLYYLSRTQSTGGTQGTQQLLFSQAGPANMSAQAKNWLPGPCYRQQRVSTTLSQNNNSNFAWTGATKYHLNGRDSLVNPGVAMATHKDDEERFFPSSGVLMFGKQGAGRDNVDYSSVMLTSEEEIKTTNPVATEQYGVVADNLQQTNTGPIVGNVNSQGALPGMVWQNRDVYLQGPIWAKIPHTDGNFHPSPLMGGFGLKHPPPQILIKNTPVPADPPTTFSQAKLASFITQYSTGQVSVEIEWELQKENSKRWNPEIQYTSNYYKSTNVDFAVNTEGTYSEPRPIGTRYLTRNL

SEQ ID NO: 315 - protein, 738 aa, synthetic construct
MAADGYLPDWLEDNLSEGIREWWDLKPGAPKPKANQQKQDDGRGLVLPGYKYLGPFNGLDKGEPVNAADAAALEHDKAYDQQLKAGDNPYLRYNHADAEFQERLQEDTSFGGNLGRAVFQAKKRVLEPLGLVEEAAKTAPGKKRPVEPSPQRSPDSSTGIGKKGQQPAKKRLNFGQTGDSESVPDPQPIGEPPAGPSGLGSGTMAAGGGAPMADNNEGADGVGSSSGNWHCDSTWLGDRVITTSTRTWALPTYNNHLYKQISNGTSGGSTNDNTYFGYSTPWGYFDFNRFHCHFSPRDWQRLINNNWGFRPKRLSFKLFNIQVKEVTQNEGTKTIANNLTSTIQVFADSEYQLPYVLGSAHQGCLPPFPADVFMIPQYGYLTLNNGSQAVGRSSFYCLEYFPSQMLRTGNNFEFSYTFEDVPFHSSYAHSQSLDRLMNPLIDQYLYYLSRTQSTGGTQGTQQLLFSQAGPANMSAQAKNWLPGPCYRQQRVSTTLSQNNNSNIAWTGATKYHLNGRDSLVNPGVAMATHKDDEERFFPSSGVLMFGKQGAGRDNVDYSSVMLTSEEEIKTTNPVATEQYGVVADNLQQTNTGPIVGNVNSQGALPGMVWQNRDVYLQGPIWAKIPHTDGNFHPSPLMGGFGLKHPPPQILIKNTPVPADPPTTFSQAKLASFITQYSTGQVSVEIEWELQKENSKRWNPEIQYTSNYYKSTNVDFAVNTEGTYSEPRPIGTRYLTRNL

SEQ ID NO: 316 - protein, 738 aa, synthetic construct
MAADGYLPDWLEDNLSEGIREWWDLKPGAPKPKANQQKQDDGRGLVLPGYKYLGPFNGLDKGEPVNAADAAALEHDKAYDQQLKAGDNPYLRYNHADAEFQERLQEDTSFGGNLGRAVFQAKKRVLEPLGLVEEAAKTAPGKKRPVEPSPQRSPDSSTGIGKKGQQPAKKRLNFGQTGDSESVPDPQPIGEPPAGPSGLGSGTMAAGGGAPMADNNEGADGVGSSSGNWHCDSTWLGDRVITTSTRTWALPTYNNHLYKQISNGTSGGSTNDNTYFGYSTPWGYFDFNRFHCHFSPRDWQRLINNNWGFRPKRLSFKLFNIQVKEVTQNEGTKTIANNLTSTIQVFADSEYQLPYVLGSAHQGCLPPFPADVFMIPQYGYLTLNNGSQAVGRSSFYCLEYFPSQMLRTGNNFEFSYTFEDVPFHSSYAHSQSLDRLMNPLIDQYLYYLSRTQSTGGTQGTQQLLFSQAGPANMSAQAKNWLPGPCYRQQRVSTTLSQNNNSNFAWTRATKYHLNGRDSLVNPGVAMATHKDDEERFFPSSGVLMFGKQGAGRDNVDYSSVMLTSEEEIKTTNPVATEQYGVVADNLQQTNTGPIVGNVNSQGALPGMVWQNRDVYLQGPIWAKIPHTDGNFHPSPLMGGFGLKHPPPQILIKNTPVPADPPTTFSQAKLASFITQYSTGQVSVEIEWELQKENSKRWNPEIQYTSNYYKSTNVDFAVNTEGTYSEPRPIGTRYLTRNL

SEQ ID NO: 317 - protein, 738 aa, synthetic construct
MAADGYLPDWLEDNLSEGIREWWDLKPGAPKPKANQQKQDDGRGLVLPGYKYLGPFNGLDKGEPVNAADAAALEHDKAYDQQLKAGDNPYLRYNHADAEFQERLQEDTSFGGNLGRAVFQAKKRVLEPLGLVEEAAKTAPGKKRPVEPSPQRSPDSSTGIGKKGQQPAKKRLNFGQTGDSESVPDPQPIGEPPAGPSGLGSGTMAAGGGAPMADNNEGADGVGSSSGNWHCDSTWLGDRVITTSTRTWALPTYNNHLYKQISNGTSGGSTNDNTYFGYSTPWGYFDFNRFHCHFSPRDWQRLINNNWGFRPKRLSFKLFNIQVKEVTQNEGTKTIANNLTSTIQVFADSEYQLPYVLGSAHQGCLPPFPADVFMIPQYGYLTLNNGSQAVGRSSFYCLEYFPSQMLRTGNNFEFSYTFEDVPFHSSYAHSQSLDRLMNPLIDQYLYYLSRTQSTGGTQGTQQLLFSQAGPANMSAQAKNWLPGPCYRQQRVSTTLSQNNNSNFAWTGATKYHLNGRDSLVNPGVAMATHKDDEERFFPSSGVLMFGKQGAGRDNVDYSSVMLTSEEEIKTTNPVATEQYGVVADNLQQTNTGPIVGNVNSQGALPGMVWQNRDVYLQGPIWAKIPHTDGNFHPSPLMGGFGLKHPPPQILIKNTPVPADPPTTFSQAKLASFITQYSTGQVSVEIEWELQKENSKRWNPEIQYTSNYCKSTNVDFAVNTEGTYSEPRPIGTRYLTRNL

SEQ ID NO: 318 - protein, 738 aa, synthetic construct
MAADGYLPDWLEDNLSEGIREWWDLKPGAPKPKANQQKQDDGRGLVLPGYKYLGPFNGLDKGEPVNAADAAALEHDKAYDQQLKAGDNPYLRYNHADAEFQERLQEDTSFGGNLGRAVFQAKKRVLEPLGLVEEAAKTAPGKKRPVEPSPQRSPDSSTGIGKKGQQPAKKRLNFGQTGDSESVPDPQPIGEPPAGPSGLGSGTMAAGGGAPMADNNEGADGVGSSSGNWHCDSTWLGDRVITTSTRTWALPTYNNHLYKQISNGTSGGSTNDNTYFGYSTPWGYFDFNRFHCHFSPRDWQRLINNNWGFRPKRLSFKLFNIQVKEVTQNEGTKTIANNLTSTIQVFADSEYQLPYVLGSAHQGCLPPFPADVFMIPQYGYLTLNNGSQAVGRSSFYCLEYFPSQMLRTGNNFEFSYTFEDVPFHSSYAHSQSLDRLMNPLIDQYLYYLSRTQSTGGTQGTQQLLFSQAGPANMSAQAKNWLPGPCYRQQRVSTTLSQNNNSNIAWTRATKYHLNGRDSLVNPGVAMATHKDDEERFFPSSGVLMFGKQGAGRDNVDYSSVMLTSEEEIKTTNPVATEQYGVVADNLQQTNTGPIVGNVNSQGALPGMVWQNRDVYLQGPIWAKIPHTDGNFHPSPLMGGFGLKHPPPQILIKNTPVPADPPTTFSQAKLASFITQYSTGQVSVEIEWELQKENSKRWNPEIQYTSNYYKSTNVDFAVNTEGTYSEPRPIGTRYLTRNL

SEQ ID NO: 319 - protein, 738 aa, synthetic construct
MAADGYLPDWLEDNLSEGIREWWDLKPGAPKPKANQQKQDDGRGLVLPGYKYLGPFNGLDKGEPVNAADAAALEHDKAYDQQLKAGDNPYLRYNHADAEFQERLQEDTSFGGNLGRAVFQAKKRVLEPLGLVEEAAKTAPGKKRPVEPSPQRSPDSSTGIGKKGQQPAKKRLNFGQTGDSESVPDPQPIGEPPAGPSGLGSGTMAAGGGAPMADNNEGADGVGSSSGNWHCDSTWLGDRVITTSTRTWALPTYNNHLYKQISNGTSGGSTNDNTYFGYSTPWGYFDFNRFHCHFSPRDWQRLINNNWGFRPKRLSFKLFNIQVKEVTQNEGTKTIANNLTSTIQVFADSEYQLPYVLGSAHQGCLPPFPADVFMIPQYGYLTLNNGSQAVGRSSFYCLEYFPSQMLRTGNNFEFSYTFEDVPFHSSYAHSQSLDRLMNPLIDQYLYYLSRTQSTGGTQGTQQLLFSQAGPANMSAQAKNWLPGPCYRQQRVSTTLSQNNNSNIAWTGATKYHLNGRDSLVNPGVAMATHKDDEERFFPSSGVLMFGKQGAGRDNVDYSSVMLTSEEEIKTTNPVATEQYGVVADNLQQTNTGPIVGNVNSQGALPGMVWQNRDVYLQGPIWAKIPHTDGNFHPSPLMGGFGLKHPPPQILIKNTPVPADPPTTFSQAKLASFITQYSTGQVSVEIEWELQKENSKRWNPEIQYTSNYCKSTNVDFAVNTEGTYSEPRPIGTRYLTRNL

SEQ ID NO: 320 - protein, 738 aa, synthetic construct
MAADGYLPDWLEDNLSEGIREWWDLKPGAPKPKANQQKQDDGRGLVLPGYKYLGPFNGLDKGEPVNAADAAALEHDKAYDQQLKAGDNPYLRYNHADAEFQERLQEDTSFGGNLGRAVFQAKKRVLEPLGLVEEAAKTAPGKKRPVEPSPQRSPDSSTGIGKKGQQPAKKRLNFGQTGDSESVPDPQPIGEPPAGPSGLGSGTMAAGGGAPMADNNEGADGVGSSSGNWHCDSTWLGDRVITTSTRTWALPTYNNHLYKQISNGTSGGSTNDNTYFGYSTPWGYFDFNRFHCHFSPRDWQRLINNNWGFRPKRLSFKLFNIQVKEVTQNEGTKTIANNLTSTIQVFADSEYQLPYVLGSAHQGCLPPFPADVFMIPQYGYLTLNNGSQAVGRSSFYCLEYFPSQMLRTGNNFEFSYTFEDVPFHSSYAHSQSLDRLMNPLIDQYLYYLSRTQSTGGTQGTQQLLFSQAGPANMSAQAKNWLPGPCYRQQRVSTTLSQNNNSNFAWTRATKYHLNGRDSLVNPGVAMATHKDDEERFFPSSGVLMFGKQGAGRDNVDYSSVMLTSEEEIKTTNPVATEQYGVVADNLQQTNTGPIVGNVNSQGALPGMVWQNRDVYLQGPIWAKIPHTDGNFHPSPLMGGFGLKHPPPQILIKNTPVPADPPTTFSQAKLASFITQYSTGQVSVEIEWELQKENSKRWNPEIQYTSNYCKSTNVDFAVNTEGTYSEPRPIGTRYLTRNL

SEQ ID NO: 321 - protein, 738 aa, synthetic construct
MAADGYLPDWLEDNLSEGIREWWDLKPGAPKPKANQQKQDDGRGLVLPGYKYLGPFNGLDKGEPVNAADAAALEHDKAYDQQLKAGDNPYLRYNHADAEFQERLQEDTSFGGNLGRAVFQAKKRVLEPLGLVEEAAKTAPGKKRPVEPSPQRSPDSSTGIGKKGQQPAKKRLNFGQTGDSESVPDPQPIGEPPAGPSGLGSGTMAAGGGAPMADNNEGADGVGSSSGNWHCDSTWLGDRVITTSTRTWALPTYNNHLYKQISNGTSGGSTNDNTYFGYSTPWGYFDFNRFHCHFSPRDWQRLINNNWGFRPKRLSFKLFNIQVKEVTQNEGTKTIANNLTSTIQVFADSEYQLPYVLGSAHQGCLPPFPADVFMIPQYGYLTLNNGSQAVGRSSFYCLEYFPSQMLRTGNNFEFSYTFEDVPFHSSYAHSQSLDRLMNPLIDQYLYYLSRTQSTGGTQGTQQLLFSQAGPANMSAQAKNWLPGPCYRQQRVSTTLSQNNNSNIAWTRATKYHLNGRDSLVNPGVAMATHKDDEERFFPSSGVLMFGKQGAGRDNVDYSSVMLTSEEEIKTTNPVATEQYGVVADNLQQTNTGPIVGNVNSQGALPGMVWQNRDVYLQGPIWAKIPHTDGNFHPSPLMGGFGLKHPPPQILIKNTPVPADPPTTFSQAKLASFITQYSTGQVSVEIEWELQKENSKRWNPEIQYTSNYCKSTNVDFAVNTEGTYSEPRPIGTRYLTRNL

SEQ ID NO: 322 - protein, 729 aa, synthetic construct
MAADGYLPDWLEDNLSEGIREWWDLKPGAPKPKANQQKQDNGRGLVLPGYKYLGPFNGLDKGEPVAADAAALEHDKAYDQQLQAGDNPYLRYHADAEFQERLQEDTSFGGNLGRAVFQAKKRVLEPLGLVESPVKTAPGKKRPVEPSPQRSPDSSTGIGKKGQQPAKKRLNFGQTGDSESVPDPQPIGEPPAGPSGLGSGTMAAGGGAPMADNNEGADGVGSSSGNWHCDSTWLGDRVITTSTRTWALPTYNNHLYKQISNGTSGGSTNDNTYFGYSTPWGYFDFNRFHCHFSPRDWQRLINNNWGFRPKRLNFLFNIQVKEVTQNEGTKTIANNLTSTIQVFTDSEYQLPYVLGSAHQGCLPPFPADVFMIPQYGYLTLNNGSQAVGRSSFYCLEYFPSQMLRTGNFEFSYFEDVPFHSSYAHSQSLDRLMNPLIDQYLYYLSRTQSTGGTAGTQQLLFSQAGPNNMSAQAKNWLPGPCYRQQRVSTTLSQNNNSNIAWTGATKYHLNGRDSLVNPGVAMATHDDEERFFPSSGVLMFGKQGAGDNVDYSSVMLTSEEEIKTTNPVATEQYGWADNLQQQNAAPIVGAVSQGALPGMVWQNRDVYLQGPIWAKIPHTDGNFHPSPLMGGFGLKHPPPQILIKNTPVPADPPTTFNQAKLASFITQYSTGQVSVEIEWELQKENSKRWNPEIQYTSNYYKSTNVDFAVNTEGTYSEPRPIGTRYLTRNL

SEQ ID NO: 323 - protein, 729 aa, synthetic construct
MAADGYLPDWLEDNLSEGIREWWDLKPGAPKPKANQQKQDNGRGLVLPGYKYLGPFNGLDKGEPVAADAAALEHDKAYDQQLQAGDNPYLRYHADAEFQERLQEDTSFGGNLGRAVFQAKKRVLEPLGLVESPVKTAPGKKRPVEPSPQRSPDSSTGIGKKGQQPAKKRLNFGQTGDSESVPDPQPIGEPPAGPSGLGSGTMAAGGGAPMADNNEGADGVGSSSGNWHCDSTWLGDRVITTSTRTWALPTYNNHLYKQISNGTSGGSTNDNTYFGYSTPWGYFDFNRFHCHFSPRDWQRLINNNWGFRPKRLNFLFNIQVKEVTQNEGTKTIANNLTSTIQVFTDSEYQLPYVLGSAHQGCLPPFPADVFMIPQYGYLTLNNGSQAVGRSSFYCLEYFPSQMLRTGNFEFSYFEDVPFHSSYAHSQSLDRLMNPLIDQYLYYLSRTQSTGGTAGTQQLLFSQAGPNNMSAQAKNWLPGPCYRQQRVSTTLSQNNNSNFAWTRATKYHLNGRDSLVNPGVAMATHDDEERFFPSSGVLMFGKQGAGDNVDYSSVMLTSEEEIKTTNPVATEQYGWADNLQQQNAAPIVGAVSQGALPGMVWQNRDVYLQGPIWAKIPHTDGNFHPSPLMGGFGLKHPPPQILIKNTPVPADPPTTFNQAKLASFITQYSTGQVSVEIEWELQKENSKRWNPEIQYTSNYYKSTNVDFAVNTEGTYSEPRPIGTRYLTRNL

SEQ ID NO: 324 - protein, 729 aa, synthetic construct
MAADGYLPDWLEDNLSEGIREWWDLKPGAPKPKANQQKQDNGRGLVLPGYKYLGPFNGLDKGEPVAADAAALEHDKAYDQQLQAGDNPYLRYHADAEFQERLQEDTSFGGNLGRAVFQAKKRVLEPLGLVESPVKTAPGKKRPVEPSPQRSPDSSTGIGKKGQQPAKKRLNFGQTGDSESVPDPQPIGEPPAGPSGLGSGTMAAGGGAPMADNNEGADGVGSSSGNWHCDSTWLGDRVITTSTRTWALPTYNNHLYKQISNGTSGGSTNDNTYFGYSTPWGYFDFNRFHCHFSPRDWQRLINNNWGFRPKRLNFLFNIQVKEVTQNEGTKTIANNLTSTIQVFTDSEYQLPYVLGSAHQGCLPPFPADVFMIPQYGYLTLNNGSQAVGRSSFYCLEYFPSQMLRTGNFEFSYFEDVPFHSSYAHSQSLDRLMNPLIDQYLYYLSRTQSTGGTAGTQQLLFSQAGPNNMSAQAKNWLPGPCYRQQRVSTTLSQNNNSNFAWTGATKYHLNGRDSLVNPGVAMATHDDEERFFPSSGVLMFGKQGAGDNVDYSSVMLTSEEEIKTTNPVATEQYGWADNLQQQNAAPIVGAVSQGALPGMVWQNRDVYLQGPIWAKIPHTDGNFHPSPLMGGFGLKHPPPQILIKNTPVPADPPTTFNQAKLASFITQYSTGQVSVEIEWELQKENSKRWNPEIQYTSNYCKSTNVDFAVNTEGTYSEPRPIGTRYLTRNL

SEQ ID NO: 325 - protein, 729 aa, synthetic construct
MAADGYLPDWLEDNLSEGIREWWDLKPGAPKPKANQQKQDNGRGLVLPGYKYLGPFNGLDKGEPVAADAAALEHDKAYDQQLQAGDNPYLRYHADAEFQERLQEDTSFGGNLGRAVFQAKKRVLEPLGLVESPVKTAPGKKRPVEPSPQRSPDSSTGIGKKGQQPAKKRLNFGQTGDSESVPDPQPIGEPPAGPSGLGSGTMAAGGGAPMADNNEGADGVGSSSGNWHCDSTWLGDRVITTSTRTWALPTYNNHLYKQISNGTSGGSTNDNTYFGYSTPWGYFDFNRFHCHFSPRDWQRLINNNWGFRPKRLNFLFNIQVKEVTQNEGTKTIANNLTSTIQVFTDSEYQLPYVLGSAHQGCLPPFPADVFMIPQYGYLTLNNGSQAVGRSSFYCLEYFPSQMLRTGNFEFSYFEDVPFHSSYAHSQSLDRLMNPLIDQYLYYLSRTQSTGGTAGTQQLLFSQAGPNNMSAQAKNWLPGPCYRQQRVSTTLSQNNNSNIAWTRATKYHLNGRDSLVNPGVAMATHDDEERFFPSSGVLMFGKQGAGDNVDYSSVMLTSEEEIKTTNPVATEQYGWADNLQQQNAAPIVGAVSQGALPGMVWQNRDVYLQGPIWAKIPHTDGNFHPSPLMGGFGLKHPPPQILIKNTPVPADPPTTFNQAKLASFITQYSTGQVSVEIEWELQKENSKRWNPEIQYTSNYYKSTNVDFAVNTEGTYSEPRPIGTRYLTRNL

SEQ ID NO: 326 - protein, 729 aa, synthetic construct
MAADGYLPDWLEDNLSEGIREWWDLKPGAPKPKANQQKQDNGRGLVLPGYKYLGPFNGLDKGEPVAADAAALEHDKAYDQQLQAGDNPYLRYHADAEFQERLQEDTSFGGNLGRAVFQAKKRVLEPLGLVESPVKTAPGKKRPVEPSPQRSPDSSTGIGKKGQQPAKKRLNFGQTGDSESVPDPQPIGEPPAGPSGLGSGTMAAGGGAPMADNNEGADGVGSSSGNWHCDSTWLGDRVITTSTRTWALPTYNNHLYKQISNGTSGGSTNDNTYFGYSTPWGYFDFNRFHCHFSPRDWQRLINNNWGFRPKRLNFLFNIQVKEVTQNEGTKTIANNLTSTIQVFTDSEYQLPYVLGSAHQGCLPPFPADVFMIPQYGYLTLNNGSQAVGRSSFYCLEYFPSQMLRTGNFEFSYFEDVPFHSSYAHSQSLDRLMNPLIDQYLYYLSRTQSTGGTAGTQQLLFSQAGPNNMSAQAKNWLPGPCYRQQRVSTTLSQNNNSNIAWTGATKYHLNGRDSLVNPGVAMATHDDEERFFPSSGVLMFGKQGAGDNVDYSSVMLTSEEEIKTTNPVATEQYGWADNLQQQNAAPIVGAVSQGALPGMVWQNRDVYLQGPIWAKIPHTDGNFHPSPLMGGFGLKHPPPQILIKNTPVPADPPTTFNQAKLASFITQYSTGQVSVEIEWELQKENSKRWNPEIQYTSNYCKSTNVDFAVNTEGTYSEPRPIGTRYLTRNL

SEQ ID NO: 327 - protein, 729 aa, synthetic construct
MAADGYLPDWLEDNLSEGIREWWDLKPGAPKPKANQQKQDNGRGLVLPGYKYLGPFNGLDKGEPVAADAAALEHDKAYDQQLQAGDNPYLRYHADAEFQERLQEDTSFGGNLGRAVFQAKKRVLEPLGLVESPVKTAPGKKRPVEPSPQRSPDSSTGIGKKGQQPAKKRLNFGQTGDSESVPDPQPIGEPPAGPSGLGSGTMAAGGGAPMADNNEGADGVGSSSGNWHCDSTWLGDRVITTSTRTWALPTYNNHLYKQISNGTSGGSTNDNTYFGYSTPWGYFDFNRFHCHFSPRDWQRLINNNWGFRPKRLNFLFNIQVKEVTQNEGTKTIANNLTSTIQVFTDSEYQLPYVLGSAHQGCLPPFPADVFMIPQYGYLTLNNGSQAVGRSSFYCLEYFPSQMLRTGNFEFSYFEDVPFHSSYAHSQSLDRLMNPLIDQYLYYLSRTQSTGGTAGTQQLLFSQAGPNNMSAQAKNWLPGPCYRQQRVSTTLSQNNNSNFAWTRATKYHLNGRDSLVNPGVAMATHDDEERFFPSSGVLMFGKQGAGDNVDYSSVMLTSEEEIKTTNPVATEQYGWADNLQQQNAAPIVGAVSQGALPGMVWQNRDVYLQGPIWAKIPHTDGNFHPSPLMGGFGLKHPPPQILIKNTPVPADPPTTFNQAKLASFITQYSTGQVSVEIEWELQKENSKRWNPEIQYTSNYCKSTNVDFAVNTEGTYSEPRPIGTRYLTRNL

SEQ ID NO: 328 - protein, 729 aa, synthetic construct
MAADGYLPDWLEDNLSEGIREWWDLKPGAPKPKANQQKQDNGRGLVLPGYKYLGPFNGLDKGEPVAADAAALEHDKAYDQQLQAGDNPYLRYHADAEFQERLQEDTSFGGNLGRAVFQAKKRVLEPLGLVESPVKTAPGKKRPVEPSPQRSPDSSTGIGKKGQQPAKKRLNFGQTGDSESVPDPQPIGEPPAGPSGLGSGTMAAGGGAPMADNNEGADGVGSSSGNWHCDSTWLGDRVITTSTRTWALPTYNNHLYKQISNGTSGGSTNDNTYFGYSTPWGYFDFNRFHCHFSPRDWQRLINNNWGFRPKRLNFLFNIQVKEVTQNEGTKTIANNLTSTIQVFTDSEYQLPYVLGSAHQGCLPPFPADVFMIPQYGYLTLNNGSQAVGRSSFYCLEYFPSQMLRTGNFEFSYFEDVPFHSSYAHSQSLDRLMNPLIDQYLYYLSRTQSTGGTAGTQQLLFSQAGPNNMSAQAKNWLPGPCYRQQRVSTTLSQNNNSNIAWTRATKYHLNGRDSLVNPGVAMATHDDEERFFPSSGVLMFGKQGAGDNVDYSSVMLTSEEEIKTTNPVATEQYGWADNLQQQNAAPIVGAVSQGALPGMVWQNRDVYLQGPIWAKIPHTDGNFHPSPLMGGFGLKHPPPQILIKNTPVPADPPTTFNQAKLASFITQYSTGQVSVEIEWELQKENSKRWNPEIQYTSNYCKSTNVDFAVNTEGTYSEPRPIGTRYLTRNL

SEQ ID NO: 329 - protein, 729 aa, synthetic construct
MAADGYLPDWLEDNLSEGIREWWDLKPGAPKPKANQQKQDNGRGLVLPGYKYLGPFNGLDKGEPVAADAAALEHDKAYDQQLQAGDNPYLRYHADAEFQERLQEDTSFGGNLGRAVFQAKKRVLEPLGLVESPVKTAPGKKRPVEPSPQRSPDSSTGIGKKGQQPAKKRLNFGQTGDSESVPDPQPIGEPPAGPSGLGSGTMAAGGGAPMADNNEGADGVGSSSGNWHCDSTWLGDRVITTSTRTWALPTYNNHLYKQISNGTSGGSTNDNTYFGYSTPWGYFDFNRFHCHFSPRDWQRLINNNWGFRPKRLNFLFNIQVKEVTQNEGTKTIANNLTSTIQVFADSEYQLPYVLGSAHQGCLPPFPADVFMIPQYGYLTLNNGSQAVGRSSFYCLEYFPSQMLRTGNFEFSYFEDVPFHSSYAHSQSLDRLMNPLIDQYLYYLSRTQSTGGTAGTQQLLFSQAGPNNMSAQAKNWLPGPCYRQQRVSTTLSQNNNSNFAWTGATKYHLNGRDSLVNPGVAMATHDDEERFFPSSGVLMFGKQGAGDNVDYSSVMLTSEEEIKTTNPVATEQYGWADNLQQQNAAPIVGAVSQGALPGMVWQNRDVYLQGPIWAKIPHTDGNFHPSPLMGGFGLKHPPPQILIKNTPVPADPPTTFNQAKLASFITQYSTGQVSVEIEWELQKENSKRWNPEIQYTSNYYKSTNVDFAVNTEGTYSEPRPIGTRYLTRNL

SEQ ID NO: 330 - protein, 729 aa, synthetic construct
MAADGYLPDWLEDNLSEGIREWWDLKPGAPKPKANQQKQDNGRGLVLPGYKYLGPFNGLDKGEPVAADAAALEHDKAYDQQLQAGDNPYLRYHADAEFQERLQEDTSFGGNLGRAVFQAKKRVLEPLGLVESPVKTAPGKKRPVEPSPQRSPDSSTGIGKKGQQPAKKRLNFGQTGDSESVPDPQPIGEPPAGPSGLGSGTMAAGGGAPMADNNEGADGVGSSSGNWHCDSTWLGDRVITTSTRTWALPTYNNHLYKQISNGTSGGSTNDNTYFGYSTPWGYFDFNRFHCHFSPRDWQRLINNNWGFRPKRLNFLFNIQVKEVTQNEGTKTIANNLTSTIQVFADSEYQLPYVLGSAHQGCLPPFPADVFMIPQYGYLTLNNGSQAVGRSSFYCLEYFPSQMLRTGNFEFSYFEDVPFHSSYAHSQSLDRLMNPLIDQYLYYLSRTQSTGGTAGTQQLLFSQAGPNNMSAQAKNWLPGPCYRQQRVSTTLSQNNNSNIAWTGATKYHLNGRDSLVNPGVAMATHDDEERFFPSSGVLMFGKQGAGDNVDYSSVMLTSEEEIKTTNPVATEQYGWADNLQQQNAAPIVGAVSQGALPGMVWQNRDVYLQGPIWAKIPHTDGNFHPSPLMGGFGLKHPPPQILIKNTPVPADPPTTFNQAKLASFITQYSTGQVSVEIEWELQKENSKRWNPEIQYTSNYYKSTNVDFAVNTEGTYSEPRPIGTRYLTRNL

SEQ ID NO: 331 - protein, 729 aa, synthetic construct
MAADGYLPDWLEDNLSEGIREWWDLKPGAPKPKANQQKQDNGRGLVLPGYKYLGPFNGLDKGEPVAADAAALEHDKAYDQQLQAGDNPYLRYHADAEFQERLQEDTSFGGNLGRAVFQAKKRVLEPLGLVESPVKTAPGKKRPVEPSPQRSPDSSTGIGKKGQQPAKKRLNFGQTGDSESVPDPQPIGEPPAGPSGLGSGTMAAGGGAPMADNNEGADGVGSSSGNWHCDSTWLGDRVITTSTRTWALPTYNNHLYKQISNGTSGGSTNDNTYFGYSTPWGYFDFNRFHCHFSPRDWQRLINNNWGFRPKRLNFLFNIQVKEVTQNEGTKTIANNLTSTIQVFADSEYQLPYVLGSAHQGCLPPFPADVFMIPQYGYLTLNNGSQAVGRSSFYCLEYFPSQMLRTGNFEFSYFEDVPFHSSYAHSQSLDRLMNPLIDQYLYYLSRTQSTGGTAGTQQLLFSQAGPNNMSAQAKNWLPGPCYRQQRVSTTLSQNNNSNFAWTRATKYHLNGRDSLVNPGVAMATHDDEERFFPSSGVLMFGKQGAGDNVDYSSVMLTSEEEIKTTNPVATEQYGWADNLQQQNAAPIVGAVSQGALPGMVWQNRDVYLQGPIWAKIPHTDGNFHPSPLMGGFGLKHPPPQILIKNTPVPADPPTTFNQAKLASFITQYSTGQVSVEIEWELQKENSKRWNPEIQYTSNYYKSTNVDFAVNTEGTYSEPRPIGTRYLTRNL

SEQ ID NO: 332 - protein, 729 aa, synthetic construct
MAADGYLPDWLEDNLSEGIREWWDLKPGAPKPKANQQKQDNGRGLVLPGYKYLGPFNGLDKGEPVAADAAALEHDKAYDQQLQAGDNPYLRYHADAEFQERLQEDTSFGGNLGRAVFQAKKRVLEPLGLVESPVKTAPGKKRPVEPSPQRSPDSSTGIGKKGQQPAKKRLNFGQTGDSESVPDPQPIGEPPAGPSGLGSGTMAAGGGAPMADNNEGADGVGSSSGNWHCDSTWLGDRVITTSTRTWALPTYNNHLYKQISNGTSGGSTNDNTYFGYSTPWGYFDFNRFHCHFSPRDWQRLINNNWGFRPKRLNFLFNIQVKEVTQNEGTKTIANNLTSTIQVFADSEYQLPYVLGSAHQGCLPPFPADVFMIPQYGYLTLNNGSQAVGRSSFYCLEYFPSQMLRTGNFEFSYFEDVPFHSSYAHSQSLDRLMNPLIDQYLYYLSRTQSTGGTAGTQQLLFSQAGPNNMSAQAKNWLPGPCYRQQRVSTTLSQNNNSNFAWTGATKYHLNGRDSLVNPGVAMATHDDEERFFPSSGVLMFGKQGAGDNVDYSSVMLTSEEEIKTTNPVATEQYGWADNLQQQNAAPIVGAVSQGALPGMVWQNRDVYLQGPIWAKIPHTDGNFHPSPLMGGFGLKHPPPQILIKNTPVPADPPTTFNQAKLASFITQYSTGQVSVEIEWELQKENSKRWNPEIQYTSNYCKSTNVDFAVNTEGTYSEPRPIGTRYLTRNL

SEQ ID NO: 333 - protein, 729 aa, synthetic construct
MAADGYLPDWLEDNLSEGIREWWDLKPGAPKPKANQQKQDNGRGLVLPGYKYLGPFNGLDKGEPVAADAAALEHDKAYDQQLQAGDNPYLRYHADAEFQERLQEDTSFGGNLGRAVFQAKKRVLEPLGLVESPVKTAPGKKRPVEPSPQRSPDSSTGIGKKGQQPAKKRLNFGQTGDSESVPDPQPIGEPPAGPSGLGSGTMAAGGGAPMADNNEGADGVGSSSGNWHCDSTWLGDRVITTSTRTWALPTYNNHLYKQISNGTSGGSTNDNTYFGYSTPWGYFDFNRFHCHFSPRDWQRLINNNWGFRPKRLNFLFNIQVKEVTQNEGTKTIANNLTSTIQVFADSEYQLPYVLGSAHQGCLPPFPADVFMIPQYGYLTLNNGSQAVGRSSFYCLEYFPSQMLRTGNFEFSYFEDVPFHSSYAHSQSLDRLMNPLIDQYLYYLSRTQSTGGTAGTQQLLFSQAGPNNMSAQAKNWLPGPCYRQQRVSTTLSQNNNSNIAWTRATKYHLNGRDSLVNPGVAMATHDDEERFFPSSGVLMFGKQGAGDNVDYSSVMLTSEEEIKTTNPVATEQYGWADNLQQQNAAPIVGAVSQGALPGMVWQNRDVYLQGPIWAKIPHTDGNFHPSPLMGGFGLKHPPPQILIKNTPVPADPPTTFNQAKLASFITQYSTGQVSVEIEWELQKENSKRWNPEIQYTSNYYKSTNVDFAVNTEGTYSEPRPIGTRYLTRNL

SEQ ID NO: 334 - protein, 729 aa, synthetic construct
MAADGYLPDWLEDNLSEGIREWWDLKPGAPKPKANQQKQDNGRGLVLPGYKYLGPFNGLDKGEPVAADAAALEHDKAYDQQLQAGDNPYLRYHADAEFQERLQEDTSFGGNLGRAVFQAKKRVLEPLGLVESPVKTAPGKKRPVEPSPQRSPDSSTGIGKKGQQPAKKRLNFGQTGDSESVPDPQPIGEPPAGPSGLGSGTMAAGGGAPMADNNEGADGVGSSSGNWHCDSTWLGDRVITTSTRTWALPTYNNHLYKQISNGTSGGSTNDNTYFGYSTPWGYFDFNRFHCHFSPRDWQRLINNNWGFRPKRLNFLFNIQVKEVTQNEGTKTIANNLTSTIQVFADSEYQLPYVLGSAHQGCLPPFPADVFMIPQYGYLTLNNGSQAVGRSSFYCLEYFPSQMLRTGNFEFSYFEDVPFHSSYAHSQSLDRLMNPLIDQYLYYLSRTQSTGGTAGTQQLLFSQAGPNNMSAQAKNWLPGPCYRQQRVSTTLSQNNNSNIAWTGATKYHLNGRDSLVNPGVAMATHDDEERFFPSSGVLMFGKQGAGDNVDYSSVMLTSEEEIKTTNPVATEQYGWADNLQQQNAAPIVGAVSQGALPGMVWQNRDVYLQGPIWAKIPHTDGNFHPSPLMGGFGLKHPPPQILIKNTPVPADPPTTFNQAKLASFITQYSTGQVSVEIEWELQKENSKRWNPEIQYTSNYCKSTNVDFAVNTEGTYSEPRPIGTRYLTRNL

SEQ ID NO: 335 - protein, 729 aa, synthetic construct
MAADGYLPDWLEDNLSEGIREWWDLKPGAPKPKANQQKQDNGRGLVLPGYKYLGPFNGLDKGEPVAADAAALEHDKAYDQQLQAGDNPYLRYHADAEFQERLQEDTSFGGNLGRAVFQAKKRVLEPLGLVESPVKTAPGKKRPVEPSPQRSPDSSTGIGKKGQQPAKKRLNFGQTGDSESVPDPQPIGEPPAGPSGLGSGTMAAGGGAPMADNNEGADGVGSSSGNWHCDSTWLGDRVITTSTRTWALPTYNNHLYKQISNGTSGGSTNDNTYFGYSTPWGYFDFNRFHCHFSPRDWQRLINNNWGFRPKRLNFLFNIQVKEVTQNEGTKTIANNLTSTIQVFADSEYQLPYVLGSAHQGCLPPFPADVFMIPQYGYLTLNNGSQAVGRSSFYCLEYFPSQMLRTGNFEFSYFEDVPFHSSYAHSQSLDRLMNPLIDQYLYYLSRTQSTGGTAGTQQLLFSQAGPNNMSAQAKNWLPGPCYRQQRVSTTLSQNNNSNFAWTRATKYHLNGRDSLVNPGVAMATHDDEERFFPSSGVLMFGKQGAGDNVDYSSVMLTSEEEIKTTNPVATEQYGWADNLQQQNAAPIVGAVSQGALPGMVWQNRDVYLQGPIWAKIPHTDGNFHPSPLMGGFGLKHPPPQILIKNTPVPADPPTTFNQAKLASFITQYSTGQVSVEIEWELQKENSKRWNPEIQYTSNYCKSTNVDFAVNTEGTYSEPRPIGTRYLTRNL

SEQ ID NO: 336 - protein, 729 aa, synthetic construct
MAADGYLPDWLEDNLSEGIREWWDLKPGAPKPKANQQKQDNGRGLVLPGYKYLGPFNGLDKGEPVAADAAALEHDKAYDQQLQAGDNPYLRYHADAEFQERLQEDTSFGGNLGRAVFQAKKRVLEPLGLVESPVKTAPGKKRPVEPSPQRSPDSSTGIGKKGQQPAKKRLNFGQTGDSESVPDPQPIGEPPAGPSGLGSGTMAAGGGAPMADNNEGADGVGSSSGNWHCDSTWLGDRVITTSTRTWALPTYNNHLYKQISNGTSGGSTNDNTYFGYSTPWGYFDFNRFHCHFSPRDWQRLINNNWGFRPKRLNFLFNIQVKEVTQNEGTKTIANNLTSTIQVFADSEYQLPYVLGSAHQGCLPPFPADVFMIPQYGYLTLNNGSQAVGRSSFYCLEYFPSQMLRTGNFEFSYFEDVPFHSSYAHSQSLDRLMNPLIDQYLYYLSRTQSTGGTAGTQQLLFSQAGPNNMSAQAKNWLPGPCYRQQRVSTTLSQNNNSNIAWTRATKYHLNGRDSLVNPGVAMATHDDEERFFPSSGVLMFGKQGAGDNVDYSSVMLTSEEEIKTTNPVATEQYGWADNLQQQNAAPIVGAVSQGALPGMVWQNRDVYLQGPIWAKIPHTDGNFHPSPLMGGFGLKHPPPQILIKNTPVPADPPTTFNQAKLASFITQYSTGQVSVEIEWELQKENSKRWNPEIQYTSNYCKSTNVDFAVNTEGTYSEPRPIGTRYLTRNL

SEQ ID NO: 337 - protein, 737 aa, synthetic construct
MAADGYLPDWLEDTLSEGIRQWWKLKPGPPPPKPAERHKDDSRGLVLPGYKYLGPFNGLDKGEPVNEADAAALEHDKAYDRQLDSGDNPYLKYNHADAEFQERLKEDTSFGGNLGRAVFQAKKRLLEPLGLVEEAAKTAPGKKRPVEHSPVEPDSSSGTGKAGQQPARKRLNFGQTGDADSVPDPQPIGEPPAAPSGVGSLTMAAGGGAPMADNNEGADGVGNSSGNWHCDSTWMGDRVITTSTRTWALPTYNNHLYKQISNSTSGGSSNDNAYFGYSTPWGYFDFNRFHCHFSPRDWQRLINNNWGFRPKRLSFKLFNIQVKEVTQNEGTKTIANNLTSTIQVFTDSEYQLPYVLGSAHQGCLPPFPADVFMIPQYGYLTLNNGSQAVGRSSFYCLEYFPSQMLRTGNNFQFTYTFEDVPFHSSYAHSQSLDRLMNPLIDQYLYYLSRTQTTGGTTNTQTLGFSQGGPNTMANQAKNWLPGPCYRQQRVSKTSADNNNSEISWTGATKYHLNGRDSLVNPGPAMASHKDDEEKFFPQSGVLIFGKQGSEKTNVDIEKVMITDEEEIRTTNPVATEQYGSVSTNLQRGNRQAATADVNTQGVLPGMVWQDRDVYLQGPIWAKIPHTDGHFHPSPLMGGFGLKHPPPQILIKNTPVPADPPTTFNQSKLNSFITQYSTGQVSVEIEWELQKENSKRWNPEIQYTSNYYKSTSVDFAVNTEGVYSEPRPIGTRYLTRNL

SEQ ID NO: 338 - protein, 737 aa, synthetic construct
MAADGYLPDWLEDTLSEGIRQWWKLKPGPPPPKPAERHKDDSRGLVLPGYKYLGPFNGLDKGEPVNEADAAALEHDKAYDRQLDSGDNPYLKYNHADAEFQERLKEDTSFGGNLGRAVFQAKKRLLEPLGLVEEAAKTAPGKKRPVEHSPVEPDSSSGTGKAGQQPARKRLNFGQTGDADSVPDPQPIGEPPAAPSGVGSLTMAAGGGAPMADNNEGADGVGNSSGNWHCDSTWMGDRVITTSTRTWALPTYNNHLYKQISNSTSGGSSNDNAYFGYSTPWGYFDFNRFHCHFSPRDWQRLINNNWGFRPKRLSFKLFNIQVKEVTQNEGTKTIANNLTSTIQVFTDSEYQLPYVLGSAHQGCLPPFPADVFMIPQYGYLTLNNGSQAVGRSSFYCLEYFPSQMLRTGNNFQFTYTFEDVPFHSSYAHSQSLDRLMNPLIDQYLYYLSRTQTTGGTTNTQTLGFSQGGPNTMANQAKNWLPGPCYRQQRVSKTSADNNNSEYSWTRATKYHLNGRDSLVNPGPAMASHKDDEEKFFPQSGVLIFGKQGSEKTNVDIEKVMITDEEEIRTTNPVATEQYGSVSTNLQRGNRQAATADVNTQGVLPGMVWQDRDVYLQGPIWAKIPHTDGHFHPSPLMGGFGLKHPPPQILIKNTPVPADPPTTFNQSKLNSFITQYSTGQVSVEIEWELQKENSKRWNPEIQYTSNYYKSTSVDFAVNTEGVYSEPRPIGTRYLTRNL

SEQ ID NO: 339 - protein, 737 aa, synthetic construct
MAADGYLPDWLEDTLSEGIRQWWKLKPGPPPPKPAERHKDDSRGLVLPGYKYLGPFNGLDKGEPVNEADAAALEHDKAYDRQLDSGDNPYLKYNHADAEFQERLKEDTSFGGNLGRAVFQAKKRLLEPLGLVEEAAKTAPGKKRPVEHSPVEPDSSSGTGKAGQQPARKRLNFGQTGDADSVPDPQPIGEPPAAPSGVGSLTMAAGGGAPMADNNEGADGVGNSSGNWHCDSTWMGDRVITTSTRTWALPTYNNHLYKQISNSTSGGSSNDNAYFGYSTPWGYFDFNRFHCHFSPRDWQRLINNNWGFRPKRLSFKLFNIQVKEVTQNEGTKTIANNLTSTIQVFTDSEYQLPYVLGSAHQGCLPPFPADVFMIPQYGYLTLNNGSQAVGRSSFYCLEYFPSQMLRTGNNFQFTYTFEDVPFHSSYAHSQSLDRLMNPLIDQYLYYLSRTQTTGGTTNTQTLGFSQGGPNTMANQAKNWLPGPCYRQQRVSKTSADNNNSEYSWTGATKYHLNGRDSLVNPGPAMASHKDDEEKFFPQSGVLIFGKQGSEKTNVDIEKVMITDEEEIRTTNPVATEQYGSVSTNLQRGNRQAATADVNTQGVLPGMVWQDRDVYLQGPIWAKIPHTDGHFHPSPLMGGFGLKHPPPQILIKNTPVPADPPTTFNQSKLNSFITQYSTGQVSVEIEWELQKENSKRWNPEIQYTSNYCKSTSVDFAVNTEGVYSEPRPIGTRYLTRNL

SEQ ID NO: 340 - protein, 737 aa, synthetic construct
MAADGYLPDWLEDTLSEGIRQWWKLKPGPPPPKPAERHKDDSRGLVLPGYKYLGPFNGLDKGEPVNEADAAALEHDKAYDRQLDSGDNPYLKYNHADAEFQERLKEDTSFGGNLGRAVFQAKKRLLEPLGLVEEAAKTAPGKKRPVEHSPVEPDSSSGTGKAGQQPARKRLNFGQTGDADSVPDPQPIGEPPAAPSGVGSLTMAAGGGAPMADNNEGADGVGNSSGNWHCDSTWMGDRVITTSTRTWALPTYNNHLYKQISNSTSGGSSNDNAYFGYSTPWGYFDFNRFHCHFSPRDWQRLINNNWGFRPKRLSFKLFNIQVKEVTQNEGTKTIANNLTSTIQVFTDSEYQLPYVLGSAHQGCLPPFPADVFMIPQYGYLTLNNGSQAVGRSSFYCLEYFPSQMLRTGNNFQFTYTFEDVPFHSSYAHSQSLDRLMNPLIDQYLYYLSRTQTTGGTTNTQTLGFSQGGPNTMANQAKNWLPGPCYRQQRVSKTSADNNNSEISWTRATKYHLNGRDSLVNPGPAMASHKDDEEKFFPQSGVLIFGKQGSEKTNVDIEKVMITDEEEIRTTNPVATEQYGSVSTNLQRGNRQAATADVNTQGVLPGMVWQDRDVYLQGPIWAKIPHTDGHFHPSPLMGGFGLKHPPPQILIKNTPVPADPPTTFNQSKLNSFITQYSTGQVSVEIEWELQKENSKRWNPEIQYTSNYYKSTSVDFAVNTEGVYSEPRPIGTRYLTRNL

SEQ ID NO: 341 - protein, 737 aa, synthetic construct
MAADGYLPDWLEDTLSEGIRQWWKLKPGPPPPKPAERHKDDSRGLVLPGYKYLGPFNGLDKGEPVNEADAAALEHDKAYDRQLDSGDNPYLKYNHADAEFQERLKEDTSFGGNLGRAVFQAKKRLLEPLGLVEEAAKTAPGKKRPVEHSPVEPDSSSGTGKAGQQPARKRLNFGQTGDADSVPDPQPIGEPPAAPSGVGSLTMAAGGGAPMADNNEGADGVGNSSGNWHCDSTWMGDRVITTSTRTWALPTYNNHLYKQISNSTSGGSSNDNAYFGYSTPWGYFDFNRFHCHFSPRDWQRLINNNWGFRPKRLSFKLFNIQVKEVTQNEGTKTIANNLTSTIQVFTDSEYQLPYVLGSAHQGCLPPFPADVFMIPQYGYLTLNNGSQAVGRSSFYCLEYFPSQMLRTGNNFQFTYTFEDVPFHSSYAHSQSLDRLMNPLIDQYLYYLSRTQTTGGTTNTQTLGFSQGGPNTMANQAKNWLPGPCYRQQRVSKTSADNNNSEYSWTRATKYHLNGRDSLVNPGPAMASHKDDEEKFFPQSGVLIFGKQGSEKTNVDIEKVMITDEEEIRTTNPVATEQYGSVSTNLQRGNRQAATADVNTQGVLPGMVWQDRDVYLQGPIWAKIPHTDGHFHPSPLMGGFGLKHPPPQILIKNTPVPADPPTTFNQSKLNSFITQYSTGQVSVEIEWELQKENSKRWNPEIQYTSNYCKSTSVDFAVNTEGVYSEPRPIGTRYLTRNL

SEQ ID NO: 342 - protein, 737 aa, synthetic construct
MAADGYLPDWLEDTLSEGIRQWWKLKPGPPPPKPAERHKDDSRGLVLPGYKYLGPFNGLDKGEPVNEADAAALEHDKAYDRQLDSGDNPYLKYNHADAEFQERLKEDTSFGGNLGRAVFQAKKRLLEPLGLVEEAAKTAPGKKRPVEHSPVEPDSSSGTGKAGQQPARKRLNFGQTGDADSVPDPQPIGEPPAAPSGVGSLTMAAGGGAPMADNNEGADGVGNSSGNWHCDSTWMGDRVITTSTRTWALPTYNNHLYKQISNSTSGGSSNDNAYFGYSTPWGYFDFNRFHCHFSPRDWQRLINNNWGFRPKRLSFKLFNIQVKEVTQNEGTKTIANNLTSTIQVFTDSEYQLPYVLGSAHQGCLPPFPADVFMIPQYGYLTLNNGSQAVGRSSFYCLEYFPSQMLRTGNNFQFTYTFEDVPFHSSYAHSQSLDRLMNPLIDQYLYYLSRTQTTGGTTNTQTLGFSQGGPNTMANQAKNWLPGPCYRQQRVSKTSADNNNSEISWTGATKYHLNGRDSLVNPGPAMASHKDDEEKFFPQSGVLIFGKQGSEKTNVDIEKVMITDEEEIRTTNPVATEQYGSVSTNLQRGNRQAATADVNTQGVLPGMVWQDRDVYLQGPIWAKIPHTDGHFHPSPLMGGFGLKHPPPQILIKNTPVPADPPTTFNQSKLNSFITQYSTGQVSVEIEWELQKENSKRWNPEIQYTSNYCKSTSVDFAVNTEGVYSEPRPIGTRYLTRNL

SEQ ID NO: 343 - protein, 737 aa, synthetic construct
MAADGYLPDWLEDTLSEGIRQWWKLKPGPPPPKPAERHKDDSRGLVLPGYKYLGPFNGLDKGEPVNEADAAALEHDKAYDRQLDSGDNPYLKYNHADAEFQERLKEDTSFGGNLGRAVFQAKKRLLEPLGLVEEAAKTAPGKKRPVEHSPVEPDSSSGTGKAGQQPARKRLNFGQTGDADSVPDPQPIGEPPAAPSGVGSLTMAAGGGAPMADNNEGADGVGNSSGNWHCDSTWMGDRVITTSTRTWALPTYNNHLYKQISNSTSGGSSNDNAYFGYSTPWGYFDFNRFHCHFSPRDWQRLINNNWGFRPKRLSFKLFNIQVKEVTQNEGTKTIANNLTSTIQVFTDSEYQLPYVLGSAHQGCLPPFPADVFMIPQYGYLTLNNGSQAVGRSSFYCLEYFPSQMLRTGNNFQFTYTFEDVPFHSSYAHSQSLDRLMNPLIDQYLYYLSRTQTTGGTTNTQTLGFSQGGPNTMANQAKNWLPGPCYRQQRVSKTSADNNNSEISWTRATKYHLNGRDSLVNPGPAMASHKDDEEKFFPQSGVLIFGKQGSEKTNVDIEKVMITDEEEIRTTNPVATEQYGSVSTNLQRGNRQAATADVNTQGVLPGMVWQDRDVYLQGPIWAKIPHTDGHFHPSPLMGGFGLKHPPPQILIKNTPVPADPPTTFNQSKLNSFITQYSTGQVSVEIEWELQKENSKRWNPEIQYTSNYCKSTSVDFAVNTEGVYSEPRPIGTRYLTRNL

SEQ ID NO: 344 - protein, 737 aa, synthetic construct
MAADGYLPDWLEDTLSEGIRQWWKLKPGPPPPKPAERHKDDSRGLVLPGYKYLGPFNGLDKGEPVNEADAAALEHDKAYDRQLDSGDNPYLKYNHADAEFQERLKEDTSFGGNLGRAVFQAKKRLLEPLGLVEEAAKTAPGKKRPVEHSPVEPDSSSGTGKAGQQPARKRLNFGQTGDADSVPDPQPIGEPPAAPSGVGSLTMAAGGGAPMADNNEGADGVGNSSGNWHCDSTWMGDRVITTSTRTWALPTYNNHLYKQISNSTSGGSSNDNAYFGYSTPWGYFDFNRFHCHFSPRDWQRLINNNWGFRPKRLSFKLFNIQVKEVTQNEGTKTIANNLTSTIQVFADSEYQLPYVLGSAHQGCLPPFPADVFMIPQYGYLTLNNGSQAVGRSSFYCLEYFPSQMLRTGNNFQFTYTFEDVPFHSSYAHSQSLDRLMNPLIDQYLYYLSRTQTTGGTTNTQTLGFSQGGPNTMANQAKNWLPGPCYRQQRVSKTSADNNNSEYSWTGATKYHLNGRDSLVNPGPAMASHKDDEEKFFPQSGVLIFGKQGSEKTNVDIEKVMITDEEEIRTTNPVATEQYGSVSTNLQRGNRQAATADVNTQGVLPGMVWQDRDVYLQGPIWAKIPHTDGHFHPSPLMGGFGLKHPPPQILIKNTPVPADPPTTFNQSKLNSFITQYSTGQVSVEIEWELQKENSKRWNPEIQYTSNYYKSTSVDFAVNTEGVYSEPRPIGTRYLTRNL

SEQ ID NO: 345 - protein, 737 aa, synthetic construct
MAADGYLPDWLEDTLSEGIRQWWKLKPGPPPPKPAERHKDDSRGLVLPGYKYLGPFNGLDKGEPVNEADAAALEHDKAYDRQLDSGDNPYLKYNHADAEFQERLKEDTSFGGNLGRAVFQAKKRLLEPLGLVEEAAKTAPGKKRPVEHSPVEPDSSSGTGKAGQQPARKRLNFGQTGDADSVPDPQPIGEPPAAPSGVGSLTMAAGGGAPMADNNEGADGVGNSSGNWHCDSTWMGDRVITTSTRTWALPTYNNHLYKQISNSTSGGSSNDNAYFGYSTPWGYFDFNRFHCHFSPRDWQRLINNNWGFRPKRLSFKLFNIQVKEVTQNEGTKTIANNLTSTIQVFADSEYQLPYVLGSAHQGCLPPFPADVFMIPQYGYLTLNNGSQAVGRSSFYCLEYFPSQMLRTGNNFQFTYTFEDVPFHSSYAHSQSLDRLMNPLIDQYLYYLSRTQTTGGTTNTQTLGFSQGGPNTMANQAKNWLPGPCYRQQRVSKTSADNNNSEISWTGATKYHLNGRDSLVNPGPAMASHKDDEEKFFPQSGVLIFGKQGSEKTNVDIEKVMITDEEEIRTTNPVATEQYGSVSTNLQRGNRQAATADVNTQGVLPGMVWQDRDVYLQGPIWAKIPHTDGHFHPSPLMGGFGLKHPPPQILIKNTPVPADPPTTFNQSKLNSFITQYSTGQVSVEIEWELQKENSKRWNPEIQYTSNYYKSTSVDFAVNTEGVYSEPRPIGTRYLTRNL

SEQ ID NO: 346 - protein, 737 aa, synthetic construct
MAADGYLPDWLEDTLSEGIRQWWKLKPGPPPPKPAERHKDDSRGLVLPGYKYLGPFNGLDKGEPVNEADAAALEHDKAYDRQLDSGDNPYLKYNHADAEFQERLKEDTSFGGNLGRAVFQAKKRLLEPLGLVEEAAKTAPGKKRPVEHSPVEPDSSSGTGKAGQQPARKRLNFGQTGDADSVPDPQPIGEPPAAPSGVGSLTMAAGGGAPMADNNEGADGVGNSSGNWHCDSTWMGDRVITTSTRTWALPTYNNHLYKQISNSTSGGSSNDNAYFGYSTPWGYFDFNRFHCHFSPRDWQRLINNNWGFRPKRLSFKLFNIQVKEVTQNEGTKTIANNLTSTIQVFADSEYQLPYVLGSAHQGCLPPFPADVFMIPQYGYLTLNNGSQAVGRSSFYCLEYFPSQMLRTGNNFQFTYTFEDVPFHSSYAHSQSLDRLMNPLIDQYLYYLSRTQTTGGTTNTQTLGFSQGGPNTMANQAKNWLPGPCYRQQRVSKTSADNNNSEYSWTRATKYHLNGRDSLVNPGPAMASHKDDEEKFFPQSGVLIFGKQGSEKTNVDIEKVMITDEEEIRTTNPVATEQYGSVSTNLQRGNRQAATADVNTQGVLPGMVWQDRDVYLQGPIWAKIPHTDGHFHPSPLMGGFGLKHPPPQILIKNTPVPADPPTTFNQSKLNSFITQYSTGQVSVEIEWELQKENSKRWNPEIQYTSNYYKSTSVDFAVNTEGVYSEPRPIGTRYLTRNL

SEQ ID NO: 347 - protein, 737 aa, synthetic construct
MAADGYLPDWLEDTLSEGIRQWWKLKPGPPPPKPAERHKDDSRGLVLPGYKYLGPFNGLDKGEPVNEADAAALEHDKAYDRQLDSGDNPYLKYNHADAEFQERLKEDTSFGGNLGRAVFQAKKRLLEPLGLVEEAAKTAPGKKRPVEHSPVEPDSSSGTGKAGQQPARKRLNFGQTGDADSVPDPQPIGEPPAAPSGVGSLTMAAGGGAPMADNNEGADGVGNSSGNWHCDSTWMGDRVITTSTRTWALPTYNNHLYKQISNSTSGGSSNDNAYFGYSTPWGYFDFNRFHCHFSPRDWQRLINNNWGFRPKRLSFKLFNIQVKEVTQNEGTKTIANNLTSTIQVFADSEYQLPYVLGSAHQGCLPPFPADVFMIPQYGYLTLNNGSQAVGRSSFYCLEYFPSQMLRTGNNFQFTYTFEDVPFHSSYAHSQSLDRLMNPLIDQYLYYLSRTQTTGGTTNTQTLGFSQGGPNTMANQAKNWLPGPCYRQQRVSKTSADNNNSEYSWTGATKYHLNGRDSLVNPGPAMASHKDDEEKFFPQSGVLIFGKQGSEKTNVDIEKVMITDEEEIRTTNPVATEQYGSVSTNLQRGNRQAATADVNTQGVLPGMVWQDRDVYLQGPIWAKIPHTDGHFHPSPLMGGFGLKHPPPQILIKNTPVPADPPTTFNQSKLNSFITQYSTGQVSVEIEWELQKENSKRWNPEIQYTSNYCKSTSVDFAVNTEGVYSEPRPIGTRYLTRNL

SEQ ID NO: 348 - protein, 737 aa, synthetic construct
MAADGYLPDWLEDTLSEGIRQWWKLKPGPPPPKPAERHKDDSRGLVLPGYKYLGPFNGLDKGEPVNEADAAALEHDKAYDRQLDSGDNPYLKYNHADAEFQERLKEDTSFGGNLGRAVFQAKKRLLEPLGLVEEAAKTAPGKKRPVEHSPVEPDSSSGTGKAGQQPARKRLNFGQTGDADSVPDPQPIGEPPAAPSGVGSLTMAAGGGAPMADNNEGADGVGNSSGNWHCDSTWMGDRVITTSTRTWALPTYNNHLYKQISNSTSGGSSNDNAYFGYSTPWGYFDFNRFHCHFSPRDWQRLINNNWGFRPKRLSFKLFNIQVKEVTQNEGTKTIANNLTSTIQVFADSEYQLPYVLGSAHQGCLPPFPADVFMIPQYGYLTLNNGSQAVGRSSFYCLEYFPSQMLRTGNNFQFTYTFEDVPFHSSYAHSQSLDRLMNPLIDQYLYYLSRTQTTGGTTNTQTLGFSQGGPNTMANQAKNWLPGPCYRQQRVSKTSADNNNSEISWTRATKYHLNGRDSLVNPGPAMASHKDDEEKFFPQSGVLIFGKQGSEKTNVDIEKVMITDEEEIRTTNPVATEQYGSVSTNLQRGNRQAATADVNTQGVLPGMVWQDRDVYLQGPIWAKIPHTDGHFHPSPLMGGFGLKHPPPQILIKNTPVPADPPTTFNQSKLNSFITQYSTGQVSVEIEWELQKENSKRWNPEIQYTSNYYKSTSVDFAVNTEGVYSEPRPIGTRYLTRNL

SEQ ID NO: 349 - protein, 737 aa, synthetic construct
MAADGYLPDWLEDTLSEGIRQWWKLKPGPPPPKPAERHKDDSRGLVLPGYKYLGPFNGLDKGEPVNEADAAALEHDKAYDRQLDSGDNPYLKYNHADAEFQERLKEDTSFGGNLGRAVFQAKKRLLEPLGLVEEAAKTAPGKKRPVEHSPVEPDSSSGTGKAGQQPARKRLNFGQTGDADSVPDPQPIGEPPAAPSGVGSLTMAAGGGAPMADNNEGADGVGNSSGNWHCDSTWMGDRVITTSTRTWALPTYNNHLYKQISNSTSGGSSNDNAYFGYSTPWGYFDFNRFHCHFSPRDWQRLINNNWGFRPKRLSFKLFNIQVKEVTQNEGTKTIANNLTSTIQVFADSEYQLPYVLGSAHQGCLPPFPADVFMIPQYGYLTLNNGSQAVGRSSFYCLEYFPSQMLRTGNNFQFTYTFEDVPFHSSYAHSQSLDRLMNPLIDQYLYYLSRTQTTGGTTNTQTLGFSQGGPNTMANQAKNWLPGPCYRQQRVSKTSADNNNSEYSWTRATKYHLNGRDSLVNPGPAMASHKDDEEKFFPQSGVLIFGKQGSEKTNVDIEKVMITDEEEIRTTNPVATEQYGSVSTNLQRGNRQAATADVNTQGVLPGMVWQDRDVYLQGPIWAKIPHTDGHFHPSPLMGGFGLKHPPPQILIKNTPVPADPPTTFNQSKLNSFITQYSTGQVSVEIEWELQKENSKRWNPEIQYTSNYCKSTSVDFAVNTEGVYSEPRPIGTRYLTRNL

SEQ ID NO: 350 - protein, 737 aa, synthetic construct
MAADGYLPDWLEDTLSEGIRQWWKLKPGPPPPKPAERHKDDSRGLVLPGYKYLGPFNGLDKGEPVNEADAAALEHDKAYDRQLDSGDNPYLKYNHADAEFQERLKEDTSFGGNLGRAVFQAKKRLLEPLGLVEEAAKTAPGKKRPVEHSPVEPDSSSGTGKAGQQPARKRLNFGQTGDADSVPDPQPIGEPPAAPSGVGSLTMAAGGGAPMADNNEGADGVGNSSGNWHCDSTWMGDRVITTSTRTWALPTYNNHLYKQISNSTSGGSSNDNAYFGYSTPWGYFDFNRFHCHFSPRDWQRLINNNWGFRPKRLSFKLFNIQVKEVTQNEGTKTIANNLTSTIQVFADSEYQLPYVLGSAHQGCLPPFPADVFMIPQYGYLTLNNGSQAVGRSSFYCLEYFPSQMLRTGNNFQFTYTFEDVPFHSSYAHSQSLDRLMNPLIDQYLYYLSRTQTTGGTTNTQTLGFSQGGPNTMANQAKNWLPGPCYRQQRVSKTSADNNNSEISWTGATKYHLNGRDSLVNPGPAMASHKDDEEKFFPQSGVLIFGKQGSEKTNVDIEKVMITDEEEIRTTNPVATEQYGSVSTNLQRGNRQAATADVNTQGVLPGMVWQDRDVYLQGPIWAKIPHTDGHFHPSPLMGGFGLKHPPPQILIKNTPVPADPPTTFNQSKLNSFITQYSTGQVSVEIEWELQKENSKRWNPEIQYTSNYCKSTSVDFAVNTEGVYSEPRPIGTRYLTRNL

SEQ ID NO: 351 - protein, 737 aa, synthetic construct
MAADGYLPDWLEDTLSEGIRQWWKLKPGPPPPKPAERHKDDSRGLVLPGYKYLGPFNGLDKGEPVNEADAAALEHDKAYDRQLDSGDNPYLKYNHADAEFQERLKEDTSFGGNLGRAVFQAKKRLLEPLGLVEEAAKTAPGKKRPVEHSPVEPDSSSGTGKAGQQPARKRLNFGQTGDADSVPDPQPIGEPPAAPSGVGSLTMAAGGGAPMADNNEGADGVGNSSGNWHCDSTWMGDRVITTSTRTWALPTYNNHLYKQISNSTSGGSSNDNAYFGYSTPWGYFDFNRFHCHFSPRDWQRLINNNWGFRPKRLSFKLFNIQVKEVTQNEGTKTIANNLTSTIQVFADSEYQLPYVLGSAHQGCLPPFPADVFMIPQYGYLTLNNGSQAVGRSSFYCLEYFPSQMLRTGNNFQFTYTFEDVPFHSSYAHSQSLDRLMNPLIDQYLYYLSRTQTTGGTTNTQTLGFSQGGPNTMANQAKNWLPGPCYRQQRVSKTSADNNNSEISWTRATKYHLNGRDSLVNPGPAMASHKDDEEKFFPQSGVLIFGKQGSEKTNVDIEKVMITDEEEIRTTNPVATEQYGSVSTNLQRGNRQAATADVNTQGVLPGMVWQDRDVYLQGPIWAKIPHTDGHFHPSPLMGGFGLKHPPPQILIKNTPVPADPPTTFNQSKLNSFITQYSTGQVSVEIEWELQKENSKRWNPEIQYTSNYCKSTSVDFAVNTEGVYSEPRPIGTRYLTRNL

SEQ ID NO: 352 - protein, 736 aa, synthetic construct
MAADGYLPDWLEDNLSEGIREWWDLKPGAPKPKANQQKQDDGRGLVLPGYKYLGPFNGLDKGEPVNAADAAALEHDKAYDQQLKAGDNPYLRYNHADAEFQERLQEDTSFGGNLGRAVFQAKKRVLEPLGLVEEGAKTAPGKKRPVEQSPQEPDSSSGIGKKGQQPARKRLNFGQTGDSESVPDPQPLGEPPAAPSGVGSNTMAAGGGAPMADNNEGADGVGNASGNWHCDSTWLGDRVITTSTRTWALPTYNNHLYKQISSQSGGSTNDNTYFGYSTPWGYFDFNRFHCHFSPRDWQRLINNNWGFRPKKLNFKLFNIQVKEVTTNDGTTTIANNLTSTVQVFTDSEYQLPYVLGSAHQGCLPPFPADVFMIPQYGYLTLNNGSQAVGRSSFYCLEYFPSQMLRTGNNFQFSYTFEDVPFHSSYAHSQSLDRLMNPLIDQYLYYLSRTQTTSGTAGNRTLQFSQAGPSSMANQAKNWLPGPCYRQQRVSKTTNQNNNSNIAWTGATKYHLNGRDSLVNPGPAMATHKDDEDKFFPMSGVLIFGKQGAGNSNVDLDNVMITNEEEIKTTNPVATEEYGTVATNLQSANTAPATGTVNSQGALPGMVWQDRDVYLQGPIWAKIPHTDGHFHPSPLMGGFGLKHPPPQILIKNTPVPANPPTTFSPAKFASFITQYSTGQVSVEIEWELQKENSKRWNPEIQYTSNYNKSTNVDFAVDTNGVYSEPRPIGTRYLTRNL

SEQ ID NO: 353 - protein, 736 aa, synthetic construct
MAADGYLPDWLEDNLSEGIREWWDLKPGAPKPKANQQKQDDGRGLVLPGYKYLGPFNGLDKGEPVNAADAAALEHDKAYDQQLKAGDNPYLRYNHADAEFQERLQEDTSFGGNLGRAVFQAKKRVLEPLGLVEEGAKTAPGKKRPVEQSPQEPDSSSGIGKKGQQPARKRLNFGQTGDSESVPDPQPLGEPPAAPSGVGSNTMAAGGGAPMADNNEGADGVGNASGNWHCDSTWLGDRVITTSTRTWALPTYNNHLYKQISSQSGGSTNDNTYFGYSTPWGYFDFNRFHCHFSPRDWQRLINNNWGFRPKKLNFKLFNIQVKEVTTNDGTTTIANNLTSTVQVFTDSEYQLPYVLGSAHQGCLPPFPADVFMIPQYGYLTLNNGSQAVGRSSFYCLEYFPSQMLRTGNNFQFSYTFEDVPFHSSYAHSQSLDRLMNPLIDQYLYYLSRTQTTSGTAGNRTLQFSQAGPSSMANQAKNWLPGPCYRQQRVSKTTNQNNNSNFAWTRATKYHLNGRDSLVNPGPAMATHKDDEDKFFPMSGVLIFGKQGAGNSNVDLDNVMITNEEEIKTTNPVATEEYGTVATNLQSANTAPATGTVNSQGALPGMVWQDRDVYLQGPIWAKIPHTDGHFHPSPLMGGFGLKHPPPQILIKNTPVPANPPTTFSPAKFASFITQYSTGQVSVEIEWELQKENSKRWNPEIQYTSNYNKSTNVDFAVDTNGVYSEPRPIGTRYLTRNL

SEQ ID NO: 354 - protein, 736 aa, synthetic construct
MAADGYLPDWLEDNLSEGIREWWDLKPGAPKPKANQQKQDDGRGLVLPGYKYLGPFNGLDKGEPVNAADAAALEHDKAYDQQLKAGDNPYLRYNHADAEFQERLQEDTSFGGNLGRAVFQAKKRVLEPLGLVEEGAKTAPGKKRPVEQSPQEPDSSSGIGKKGQQPARKRLNFGQTGDSESVPDPQPLGEPPAAPSGVGSNTMAAGGGAPMADNNEGADGVGNASGNWHCDSTWLGDRVITTSTRTWALPTYNNHLYKQISSQSGGSTNDNTYFGYSTPWGYFDFNRFHCHFSPRDWQRLINNNWGFRPKKLNFKLFNIQVKEVTTNDGTTTIANNLTSTVQVFTDSEYQLPYVLGSAHQGCLPPFPADVFMIPQYGYLTLNNGSQAVGRSSFYCLEYFPSQMLRTGNNFQFSYTFEDVPFHSSYAHSQSLDRLMNPLIDQYLYYLSRTQTTSGTAGNRTLQFSQAGPSSMANQAKNWLPGPCYRQQRVSKTTNQNNNSNFAWTGATKYHLNGRDSLVNPGPAMATHKDDEDKFFPMSGVLIFGKQGAGNSNVDLDNVMITNEEEIKTTNPVATEEYGTVATNLQSANTAPATGTVNSQGALPGMVWQDRDVYLQGPIWAKIPHTDGHFHPSPLMGGFGLKHPPPQILIKNTPVPANPPTTFSPAKFASFITQYSTGQVSVEIEWELQKENSKRWNPEIQYTSNYCKSTNVDFAVDTNGVYSEPRPIGTRYLTRNL

SEQ ID NO: 355 - protein, 736 aa, synthetic construct
MAADGYLPDWLEDNLSEGIREWWDLKPGAPKPKANQQKQDDGRGLVLPGYKYLGPFNGLDKGEPVNAADAAALEHDKAYDQQLKAGDNPYLRYNHADAEFQERLQEDTSFGGNLGRAVFQAKKRVLEPLGLVEEGAKTAPGKKRPVEQSPQEPDSSSGIGKKGQQPARKRLNFGQTGDSESVPDPQPLGEPPAAPSGVGSNTMAAGGGAPMADNNEGADGVGNASGNWHCDSTWLGDRVITTSTRTWALPTYNNHLYKQISSQSGGSTNDNTYFGYSTPWGYFDFNRFHCHFSPRDWQRLINNNWGFRPKKLNFKLFNIQVKEVTTNDGTTTIANNLTSTVQVFTDSEYQLPYVLGSAHQGCLPPFPADVFMIPQYGYLTLNNGSQAVGRSSFYCLEYFPSQMLRTGNNFQFSYTFEDVPFHSSYAHSQSLDRLMNPLIDQYLYYLSRTQTTSGTAGNRTLQFSQAGPSSMANQAKNWLPGPCYRQQRVSKTTNQNNNSNIAWTRATKYHLNGRDSLVNPGPAMATHKDDEDKFFPMSGVLIFGKQGAGNSNVDLDNVMITNEEEIKTTNPVATEEYGTVATNLQSANTAPATGTVNSQGALPGMVWQDRDVYLQGPIWAKIPHTDGHFHPSPLMGGFGLKHPPPQILIKNTPVPANPPTTFSPAKFASFITQYSTGQVSVEIEWELQKENSKRWNPEIQYTSNYNKSTNVDFAVDTNGVYSEPRPIGTRYLTRNL

SEQ ID NO: 356 - protein, 736 aa, synthetic construct
MAADGYLPDWLEDNLSEGIREWWDLKPGAPKPKANQQKQDDGRGLVLPGYKYLGPFNGLDKGEPVNAADAAALEHDKAYDQQLKAGDNPYLRYNHADAEFQERLQEDTSFGGNLGRAVFQAKKRVLEPLGLVEEGAKTAPGKKRPVEQSPQEPDSSSGIGKKGQQPARKRLNFGQTGDSESVPDPQPLGEPPAAPSGVGSNTMAAGGGAPMADNNEGADGVGNASGNWHCDSTWLGDRVITTSTRTWALPTYNNHLYKQISSQSGGSTNDNTYFGYSTPWGYFDFNRFHCHFSPRDWQRLINNNWGFRPKKLNFKLFNIQVKEVTTNDGTTTIANNLTSTVQVFTDSEYQLPYVLGSAHQGCLPPFPADVFMIPQYGYLTLNNGSQAVGRSSFYCLEYFPSQMLRTGNNFQFSYTFEDVPFHSSYAHSQSLDRLMNPLIDQYLYYLSRTQTTSGTAGNRTLQFSQAGPSSMANQAKNWLPGPCYRQQRVSKTTNQNNNSNIAWTGATKYHLNGRDSLVNPGPAMATHKDDEDKFFPMSGVLIFGKQGAGNSNVDLDNVMITNEEEIKTTNPVATEEYGTVATNLQSANTAPATGTVNSQGALPGMVWQDRDVYLQGPIWAKIPHTDGHFHPSPLMGGFGLKHPPPQILIKNTPVPANPPTTFSPAKFASFITQYSTGQVSVEIEWELQKENSKRWNPEIQYTSNYCKSTNVDFAVDTNGVYSEPRPIGTRYLTRNL

SEQ ID NO: 357 - protein, 736 aa, synthetic construct
MAADGYLPDWLEDNLSEGIREWWDLKPGAPKPKANQQKQDDGRGLVLPGYKYLGPFNGLDKGEPVNAADAAALEHDKAYDQQLKAGDNPYLRYNHADAEFQERLQEDTSFGGNLGRAVFQAKKRVLEPLGLVEEGAKTAPGKKRPVEQSPQEPDSSSGIGKKGQQPARKRLNFGQTGDSESVPDPQPLGEPPAAPSGVGSNTMAAGGGAPMADNNEGADGVGNASGNWHCDSTWLGDRVITTSTRTWALPTYNNHLYKQISSQSGGSTNDNTYFGYSTPWGYFDFNRFHCHFSPRDWQRLINNNWGFRPKKLNFKLFNIQVKEVTTNDGTTTIANNLTSTVQVFTDSEYQLPYVLGSAHQGCLPPFPADVFMIPQYGYLTLNNGSQAVGRSSFYCLEYFPSQMLRTGNNFQFSYTFEDVPFHSSYAHSQSLDRLMNPLIDQYLYYLSRTQTTSGTAGNRTLQFSQAGPSSMANQAKNWLPGPCYRQQRVSKTTNQNNNSNFAWTRATKYHLNGRDSLVNPGPAMATHKDDEDKFFPMSGVLIFGKQGAGNSNVDLDNVMITNEEEIKTTNPVATEEYGTVATNLQSANTAPATGTVNSQGALPGMVWQDRDVYLQGPIWAKIPHTDGHFHPSPLMGGFGLKHPPPQILIKNTPVPANPPTTFSPAKFASFITQYSTGQVSVEIEWELQKENSKRWNPEIQYTSNYCKSTNVDFAVDTNGVYSEPRPIGTRYLTRNL

SEQ ID NO: 358 - protein, 736 aa, synthetic construct
MAADGYLPDWLEDNLSEGIREWWDLKPGAPKPKANQQKQDDGRGLVLPGYKYLGPFNGLDKGEPVNAADAAALEHDKAYDQQLKAGDNPYLRYNHADAEFQERLQEDTSFGGNLGRAVFQAKKRVLEPLGLVEEGAKTAPGKKRPVEQSPQEPDSSSGIGKKGQQPARKRLNFGQTGDSESVPDPQPLGEPPAAPSGVGSNTMAAGGGAPMADNNEGADGVGNASGNWHCDSTWLGDRVITTSTRTWALPTYNNHLYKQISSQSGGSTNDNTYFGYSTPWGYFDFNRFHCHFSPRDWQRLINNNWGFRPKKLNFKLFNIQVKEVTTNDGTTTIANNLTSTVQVFTDSEYQLPYVLGSAHQGCLPPFPADVFMIPQYGYLTLNNGSQAVGRSSFYCLEYFPSQMLRTGNNFQFSYTFEDVPFHSSYAHSQSLDRLMNPLIDQYLYYLSRTQTTSGTAGNRTLQFSQAGPSSMANQAKNWLPGPCYRQQRVSKTTNQNNNSNIAWTRATKYHLNGRDSLVNPGPAMATHKDDEDKFFPMSGVLIFGKQGAGNSNVDLDNVMITNEEEIKTTNPVATEEYGTVATNLQSANTAPATGTVNSQGALPGMVWQDRDVYLQGPIWAKIPHTDGHFHPSPLMGGFGLKHPPPQILIKNTPVPANPPTTFSPAKFASFITQYSTGQVSVEIEWELQKENSKRWNPEIQYTSNYCKSTNVDFAVDTNGVYSEPRPIGTRYLTRNL

SEQ ID NO: 359 - protein, 736 aa, synthetic construct
MAADGYLPDWLEDNLSEGIREWWDLKPGAPKPKANQQKQDDGRGLVLPGYKYLGPFNGLDKGEPVNAADAAALEHDKAYDQQLKAGDNPYLRYNHADAEFQERLQEDTSFGGNLGRAVFQAKKRVLEPLGLVEEGAKTAPGKKRPVEQSPQEPDSSSGIGKKGQQPARKRLNFGQTGDSESVPDPQPLGEPPAAPSGVGSNTMAAGGGAPMADNNEGADGVGNASGNWHCDSTWLGDRVITTSTRTWALPTYNNHLYKQISSQSGGSTNDNTYFGYSTPWGYFDFNRFHCHFSPRDWQRLINNNWGFRPKKLNFKLFNIQVKEVTTNDGTTTIANNLTSTVQVFADSEYQLPYVLGSAHQGCLPPFPADVFMIPQYGYLTLNNGSQAVGRSSFYCLEYFPSQMLRTGNNFQFSYTFEDVPFHSSYAHSQSLDRLMNPLIDQYLYYLSRTQTTSGTAGNRTLQFSQAGPSSMANQAKNWLPGPCYRQQRVSKTTNQNNNSNFAWTGATKYHLNGRDSLVNPGPAMATHKDDEDKFFPMSGVLIFGKQGAGNSNVDLDNVMITNEEEIKTTNPVATEEYGTVATNLQSANTAPATGTVNSQGALPGMVWQDRDVYLQGPIWAKIPHTDGHFHPSPLMGGFGLKHPPPQILIKNTPVPANPPTTFSPAKFASFITQYSTGQVSVEIEWELQKENSKRWNPEIQYTSNYNKSTNVDFAVDTNGVYSEPRPIGTRYLTRNL

SEQ ID NO: 360 - protein, 736 aa, synthetic construct
MAADGYLPDWLEDNLSEGIREWWDLKPGAPKPKANQQKQDDGRGLVLPGYKYLGPFNGLDKGEPVNAADAAALEHDKAYDQQLKAGDNPYLRYNHADAEFQERLQEDTSFGGNLGRAVFQAKKRVLEPLGLVEEGAKTAPGKKRPVEQSPQEPDSSSGIGKKGQQPARKRLNFGQTGDSESVPDPQPLGEPPAAPSGVGSNTMAAGGGAPMADNNEGADGVGNASGNWHCDSTWLGDRVITTSTRTWALPTYNNHLYKQISSQSGGSTNDNTYFGYSTPWGYFDFNRFHCHFSPRDWQRLINNNWGFRPKKLNFKLFNIQVKEVTTNDGTTTIANNLTSTVQVFADSEYQLPYVLGSAHQGCLPPFPADVFMIPQYGYLTLNNGSQAVGRSSFYCLEYFPSQMLRTGNNFQFSYTFEDVPFHSSYAHSQSLDRLMNPLIDQYLYYLSRTQTTSGTAGNRTLQFSQAGPSSMANQAKNWLPGPCYRQQRVSKTTNQNNNSNIAWTGATKYHLNGRDSLVNPGPAMATHKDDEDKFFPMSGVLIFGKQGAGNSNVDLDNVMITNEEEIKTTNPVATEEYGTVATNLQSANTAPATGTVNSQGALPGMVWQDRDVYLQGPIWAKIPHTDGHFHPSPLMGGFGLKHPPPQILIKNTPVPANPPTTFSPAKFASFITQYSTGQVSVEIEWELQKENSKRWNPEIQYTSNYNKSTNVDFAVDTNGVYSEPRPIGTRYLTRNL

SEQ ID NO: 361 - protein, 736 aa, synthetic construct
MAADGYLPDWLEDNLSEGIREWWDLKPGAPKPKANQQKQDDGRGLVLPGYKYLGPFNGLDKGEPVNAADAAALEHDKAYDQQLKAGDNPYLRYNHADAEFQERLQEDTSFGGNLGRAVFQAKKRVLEPLGLVEEGAKTAPGKKRPVEQSPQEPDSSSGIGKKGQQPARKRLNFGQTGDSESVPDPQPLGEPPAAPSGVGSNTMAAGGGAPMADNNEGADGVGNASGNWHCDSTWLGDRVITTSTRTWALPTYNNHLYKQISSQSGGSTNDNTYFGYSTPWGYFDFNRFHCHFSPRDWQRLINNNWGFRPKKLNFKLFNIQVKEVTTNDGTTTIANNLTSTVQVFADSEYQLPYVLGSAHQGCLPPFPADVFMIPQYGYLTLNNGSQAVGRSSFYCLEYFPSQMLRTGNNFQFSYTFEDVPFHSSYAHSQSLDRLMNPLIDQYLYYLSRTQTTSGTAGNRTLQFSQAGPSSMANQAKNWLPGPCYRQQRVSKTTNQNNNSNFAWTRATKYHLNGRDSLVNPGPAMATHKDDEDKFFPMSGVLIFGKQGAGNSNVDLDNVMITNEEEIKTTNPVATEEYGTVATNLQSANTAPATGTVNSQGALPGMVWQDRDVYLQGPIWAKIPHTDGHFHPSPLMGGFGLKHPPPQILIKNTPVPANPPTTFSPAKFASFITQYSTGQVSVEIEWELQKENSKRWNPEIQYTSNYNKSTNVDFAVDTNGVYSEPRPIGTRYLTRNL

SEQ ID NO: 362 - protein, 736 aa, synthetic construct
MAADGYLPDWLEDNLSEGIREWWDLKPGAPKPKANQQKQDDGRGLVLPGYKYLGPFNGLDKGEPVNAADAAALEHDKAYDQQLKAGDNPYLRYNHADAEFQERLQEDTSFGGNLGRAVFQAKKRVLEPLGLVEEGAKTAPGKKRPVEQSPQEPDSSSGIGKKGQQPARKRLNFGQTGDSESVPDPQPLGEPPAAPSGVGSNTMAAGGGAPMADNNEGADGVGNASGNWHCDSTWLGDRVITTSTRTWALPTYNNHLYKQISSQSGGSTNDNTYFGYSTPWGYFDFNRFHCHFSPRDWQRLINNNWGFRPKKLNFKLFNIQVKEVTTNDGTTTIANNLTSTVQVFADSEYQLPYVLGSAHQGCLPPFPADVFMIPQYGYLTLNNGSQAVGRSSFYCLEYFPSQMLRTGNNFQFSYTFEDVPFHSSYAHSQSLDRLMNPLIDQYLYYLSRTQTTSGTAGNRTLQFSQAGPSSMANQAKNWLPGPCYRQQRVSKTTNQNNNSNFAWTGATKYHLNGRDSLVNPGPAMATHKDDEDKFFPMSGVLIFGKQGAGNSNVDLDNVMITNEEEIKTTNPVATEEYGTVATNLQSANTAPATGTVNSQGALPGMVWQDRDVYLQGPIWAKIPHTDGHFHPSPLMGGFGLKHPPPQILIKNTPVPANPPTTFSPAKFASFITQYSTGQVSVEIEWELQKENSKRWNPEIQYTSNYCKSTNVDFAVDTNGVYSEPRPIGTRYLTRNL

SEQ ID NO: 363 - protein, 736 aa, synthetic construct
MAADGYLPDWLEDNLSEGIREWWDLKPGAPKPKANQQKQDDGRGLVLPGYKYLGPFNGLDKGEPVNAADAAALEHDKAYDQQLKAGDNPYLRYNHADAEFQERLQEDTSFGGNLGRAVFQAKKRVLEPLGLVEEGAKTAPGKKRPVEQSPQEPDSSSGIGKKGQQPARKRLNFGQTGDSESVPDPQPLGEPPAAPSGVGSNTMAAGGGAPMADNNEGADGVGNASGNWHCDSTWLGDRVITTSTRTWALPTYNNHLYKQISSQSGGSTNDNTYFGYSTPWGYFDFNRFHCHFSPRDWQRLINNNWGFRPKKLNFKLFNIQVKEVTTNDGTTTIANNLTSTVQVFADSEYQLPYVLGSAHQGCLPPFPADVFMIPQYGYLTLNNGSQAVGRSSFYCLEYFPSQMLRTGNNFQFSYTFEDVPFHSSYAHSQSLDRLMNPLIDQYLYYLSRTQTTSGTAGNRTLQFSQAGPSSMANQAKNWLPGPCYRQQRVSKTTNQNNNSNIAWTRATKYHLNGRDSLVNPGPAMATHKDDEDKFFPMSGVLIFGKQGAGNSNVDLDNVMITNEEEIKTTNPVATEEYGTVATNLQSANTAPATGTVNSQGALPGMVWQDRDVYLQGPIWAKIPHTDGHFHPSPLMGGFGLKHPPPQILIKNTPVPANPPTTFSPAKFASFITQYSTGQVSVEIEWELQKENSKRWNPEIQYTSNYNKSTNVDFAVDTNGVYSEPRPIGTRYLTRNL

SEQ ID NO: 364 - protein, 736 aa, synthetic construct
MAADGYLPDWLEDNLSEGIREWWDLKPGAPKPKANQQKQDDGRGLVLPGYKYLGPFNGLDKGEPVNAADAAALEHDKAYDQQLKAGDNPYLRYNHADAEFQERLQEDTSFGGNLGRAVFQAKKRVLEPLGLVEEGAKTAPGKKRPVEQSPQEPDSSSGIGKKGQQPARKRLNFGQTGDSESVPDPQPLGEPPAAPSGVGSNTMAAGGGAPMADNNEGADGVGNASGNWHCDSTWLGDRVITTSTRTWALPTYNNHLYKQISSQSGGSTNDNTYFGYSTPWGYFDFNRFHCHFSPRDWQRLINNNWGFRPKKLNFKLFNIQVKEVTTNDGTTTIANNLTSTVQVFADSEYQLPYVLGSAHQGCLPPFPADVFMIPQYGYLTLNNGSQAVGRSSFYCLEYFPSQMLRTGNNFQFSYTFEDVPFHSSYAHSQSLDRLMNPLIDQYLYYLSRTQTTSGTAGNRTLQFSQAGPSSMANQAKNWLPGPCYRQQRVSKTTNQNNNSNIAWTGATKYHLNGRDSLVNPGPAMATHKDDEDKFFPMSGVLIFGKQGAGNSNVDLDNVMITNEEEIKTTNPVATEEYGTVATNLQSANTAPATGTVNSQGALPGMVWQDRDVYLQGPIWAKIPHTDGHFHPSPLMGGFGLKHPPPQILIKNTPVPANPPTTFSPAKFASFITQYSTGQVSVEIEWELQKENSKRWNPEIQYTSNYCKSTNVDFAVDTNGVYSEPRPIGTRYLTRNL

SEQ ID NO: 365 - protein, 736 aa, synthetic construct
MAADGYLPDWLEDNLSEGIREWWDLKPGAPKPKANQQKQDDGRGLVLPGYKYLGPFNGLDKGEPVNAADAAALEHDKAYDQQLKAGDNPYLRYNHADAEFQERLQEDTSFGGNLGRAVFQAKKRVLEPLGLVEEGAKTAPGKKRPVEQSPQEPDSSSGIGKKGQQPARKRLNFGQTGDSESVPDPQPLGEPPAAPSGVGSNTMAAGGGAPMADNNEGADGVGNASGNWHCDSTWLGDRVITTSTRTWALPTYNNHLYKQISSQSGGSTNDNTYFGYSTPWGYFDFNRFHCHFSPRDWQRLINNNWGFRPKKLNFKLFNIQVKEVTTNDGTTTIANNLTSTVQVFADSEYQLPYVLGSAHQGCLPPFPADVFMIPQYGYLTLNNGSQAVGRSSFYCLEYFPSQMLRTGNNFQFSYTFEDVPFHSSYAHSQSLDRLMNPLIDQYLYYLSRTQTTSGTAGNRTLQFSQAGPSSMANQAKNWLPGPCYRQQRVSKTTNQNNNSNFAWTRATKYHLNGRDSLVNPGPAMATHKDDEDKFFPMSGVLIFGKQGAGNSNVDLDNVMITNEEEIKTTNPVATEEYGTVATNLQSANTAPATGTVNSQGALPGMVWQDRDVYLQGPIWAKIPHTDGHFHPSPLMGGFGLKHPPPQILIKNTPVPANPPTTFSPAKFASFITQYSTGQVSVEIEWELQKENSKRWNPEIQYTSNYCKSTNVDFAVDTNGVYSEPRPIGTRYLTRNL

SEQ ID NO: 366 - protein, 736 aa, synthetic construct
MAADGYLPDWLEDNLSEGIREWWDLKPGAPKPKANQQKQDDGRGLVLPGYKYLGPFNGLDKGEPVNAADAAALEHDKAYDQQLKAGDNPYLRYNHADAEFQERLQEDTSFGGNLGRAVFQAKKRVLEPLGLVEEGAKTAPGKKRPVEQSPQEPDSSSGIGKKGQQPARKRLNFGQTGDSESVPDPQPLGEPPAAPSGVGSNTMAAGGGAPMADNNEGADGVGNASGNWHCDSTWLGDRVITTSTRTWALPTYNNHLYKQISSQSGGSTNDNTYFGYSTPWGYFDFNRFHCHFSPRDWQRLINNNWGFRPKKLNFKLFNIQVKEVTTNDGTTTIANNLTSTVQVFADSEYQLPYVLGSAHQGCLPPFPADVFMIPQYGYLTLNNGSQAVGRSSFYCLEYFPSQMLRTGNNFQFSYTFEDVPFHSSYAHSQSLDRLMNPLIDQYLYYLSRTQTTSGTAGNRTLQFSQAGPSSMANQAKNWLPGPCYRQQRVSKTTNQNNNSNIAWTRATKYHLNGRDSLVNPGPAMATHKDDEDKFFPMSGVLIFGKQGAGNSNVDLDNVMITNEEEIKTTNPVATEEYGTVATNLQSANTAPATGTVNSQGALPGMVWQDRDVYLQGPIWAKIPHTDGHFHPSPLMGGFGLKHPPPQILIKNTPVPANPPTTFSPAKFASFITQYSTGQVSVEIEWELQKENSKRWNPEIQYTSNYCKSTNVDFAVDTNGVYSEPRPIGTRYLTRNL

SEQ ID NO: 367 - protein, 737 aa, synthetic construct
MAADGYLPDWLEDTLSEGIRQWWKLKPGPPPPKPAERHKDDSRGLVLPGYKYLGPFNGLDKGEPVNEADAAALEHDKAYDRQLDSGDNPYLKYNHADAEFQERLKEDTSFGGNLGRAVFQAKKRLLEPLGLVEEAAKTAPGKKRPVEQSPQEPDSSSGIGKTGQQPAKKRLNFGQTGDTESVPDPQPIGEPPAAPSGVGSLTMASGGGAPVADNNEGADGVGSSSGNWHCDSQWLGDRVITTSTRTWALPTYNNHLYKQISNGTSGGATNDNTYFGYSTPWGYFDFNRFHCHFSPRDWQRLINNNWGFRPKRLSFKLFNIQVKEVTQNEGTKTIANNLTSTVQVFTDSEYQLPYVLGSAHQGCLPPFPADVFMIPQYGYLTLNNGSQAVGRSSFYCLEYFPSQMLRTGNNFQFTYTFEDVPFHSSYAHSQSLDRLMNPLIDQYLYYLSRTQTTGGTANTQTLGFSQGGPNTMANQAKNWLPGPCYRQQRVSTTTGQNNNSNIAWTAGTKYHLNGRNSLANPGIAMATHKDDKERFFPSNGILIFGKQNAARDNADYSDVMLTSEEEIKTTNPVATEEYGIVADNLQQQNTAPQIGTVNSQGALPGMVWQNRDVYLQGPIWAKIPHTDGNFHPSPLMGGFGLKHPPPQILIKNTPVPADPPTTFNQSKLNSFITQYSTGQVSVEIEWELQKENSKRWNPEIQYTSNYYKSTSVDFAVNTEGVYSEPHPIGTRYLTRPL

SEQ ID NO: 368 - protein, 737 aa, synthetic construct
MAADGYLPDWLEDTLSEGIRQWWKLKPGPPPPKPAERHKDDSRGLVLPGYKYLGPFNGLDKGEPVNEADAAALEHDKAYDRQLDSGDNPYLKYNHADAEFQERLKEDTSFGGNLGRAVFQAKKRLLEPLGLVEEAAKTAPGKKRPVEQSPQEPDSSSGIGKTGQQPAKKRLNFGQTGDTESVPDPQPIGEPPAAPSGVGSLTMASGGGAPVADNNEGADGVGSSSGNWHCDSQWLGDRVITTSTRTWALPTYNNHLYKQISNGTSGGATNDNTYFGYSTPWGYFDFNRFHCHFSPRDWQRLINNNWGFRPKRLSFKLFNIQVKEVTQNEGTKTIANNLTSTVQVFTDSEYQLPYVLGSAHQGCLPPFPADVFMIPQYGYLTLNNGSQAVGRSSFYCLEYFPSQMLRTGNNFQFTYTFEDVPFHSSYAHSQSLDRLMNPLIDQYLYYLSRTQTTGGTANTQTLGFSQGGPNTMANQAKNWLPGPCYRQQRVSTTTGQNNNSNFAWTRGTKYHLNGRNSLANPGIAMATHKDDKERFFPSNGILIFGKQNAARDNADYSDVMLTSEEEIKTTNPVATEEYGIVADNLQQQNTAPQIGTVNSQGALPGMVWQNRDVYLQGPIWAKIPHTDGNFHPSPLMGGFGLKHPPPQILIKNTPVPADPPTTFNQSKLNSFITQYSTGQVSVEIEWELQKENSKRWNPEIQYTSNYYKSTSVDFAVNTEGVYSEPHPIGTRYLTRPL

SEQ ID NO: 369 - protein, 737 aa, synthetic construct
MAADGYLPDWLEDTLSEGIRQWWKLKPGPPPPKPAERHKDDSRGLVLPGYKYLGPFNGLDKGEPVNEADAAALEHDKAYDRQLDSGDNPYLKYNHADAEFQERLKEDTSFGGNLGRAVFQAKKRLLEPLGLVEEAAKTAPGKKRPVEQSPQEPDSSSGIGKTGQQPAKKRLNFGQTGDTESVPDPQPIGEPPAAPSGVGSLTMASGGGAPVADNNEGADGVGSSSGNWHCDSQWLGDRVITTSTRTWALPTYNNHLYKQISNGTSGGATNDNTYFGYSTPWGYFDFNRFHCHFSPRDWQRLINNNWGFRPKRLSFKLFNIQVKEVTQNEGTKTIANNLTSTVQVFTDSEYQLPYVLGSAHQGCLPPFPADVFMIPQYGYLTLNNGSQAVGRSSFYCLEYFPSQMLRTGNNFQFTYTFEDVPFHSSYAHSQSLDRLMNPLIDQYLYYLSRTQTTGGTANTQTLGFSQGGPNTMANQAKNWLPGPCYRQQRVSTTTGQNNNSNFAWTAGTKYHLNGRNSLANPGIAMATHKDDKERFFPSNGILIFGKQNAARDNADYSDVMLTSEEEIKTTNPVATEEYGIVADNLQQQNTAPQIGTVNSQGALPGMVWQNRDVYLQGPIWAKIPHTDGNFHPSPLMGGFGLKHPPPQILIKNTPVPADPPTTFNQSKLNSFITQYSTGQVSVEIEWELQKENSKRWNPEIQYTSNYCKSTSVDFAVNTEGVYSEPHPIGTRYLTRPL

SEQ ID NO: 370 - protein, 737 aa, synthetic construct
MAADGYLPDWLEDTLSEGIRQWWKLKPGPPPPKPAERHKDDSRGLVLPGYKYLGPFNGLDKGEPVNEADAAALEHDKAYDRQLDSGDNPYLKYNHADAEFQERLKEDTSFGGNLGRAVFQAKKRLLEPLGLVEEAAKTAPGKKRPVEQSPQEPDSSSGIGKTGQQPAKKRLNFGQTGDTESVPDPQPIGEPPAAPSGVGSLTMASGGGAPVADNNEGADGVGSSSGNWHCDSQWLGDRVITTSTRTWALPTYNNHLYKQISNGTSGGATNDNTYFGYSTPWGYFDFNRFHCHFSPRDWQRLINNNWGFRPKRLSFKLFNIQVKEVTQNEGTKTIANNLTSTVQVFTDSEYQLPYVLGSAHQGCLPPFPADVFMIPQYGYLTLNNGSQAVGRSSFYCLEYFPSQMLRTGNNFQFTYTFEDVPFHSSYAHSQSLDRLMNPLIDQYLYYLSRTQTTGGTANTQTLGFSQGGPNTMANQAKNWLPGPCYRQQRVSTTTGQNNNSNIAWTRGTKYHLNGRNSLANPGIAMATHKDDKERFFPSNGILIFGKQNAARDNADYSDVMLTSEEEIKTTNPVATEEYGIVADNLQQQNTAPQIGTVNSQGALPGMVWQNRDVYLQGPIWAKIPHTDGNFHPSPLMGGFGLKHPPPQILIKNTPVPADPPTTFNQSKLNSFITQYSTGQVSVEIEWELQKENSKRWNPEIQYTSNYYKSTSVDFAVNTEGVYSEPHPIGTRYLTRPL

SEQ ID NO: 371 - protein, 737 aa, synthetic construct
MAADGYLPDWLEDTLSEGIRQWWKLKPGPPPPKPAERHKDDSRGLVLPGYKYLGPFNGLDKGEPVNEADAAALEHDKAYDRQLDSGDNPYLKYNHADAEFQERLKEDTSFGGNLGRAVFQAKKRLLEPLGLVEEAAKTAPGKKRPVEQSPQEPDSSSGIGKTGQQPAKKRLNFGQTGDTESVPDPQPIGEPPAAPSGVGSLTMASGGGAPVADNNEGADGVGSSSGNWHCDSQWLGDRVITTSTRTWALPTYNNHLYKQISNGTSGGATNDNTYFGYSTPWGYFDFNRFHCHFSPRDWQRLINNNWGFRPKRLSFKLFNIQVKEVTQNEGTKTIANNLTSTVQVFTDSEYQLPYVLGSAHQGCLPPFPADVFMIPQYGYLTLNNGSQAVGRSSFYCLEYFPSQMLRTGNNFQFTYTFEDVPFHSSYAHSQSLDRLMNPLIDQYLYYLSRTQTTGGTANTQTLGFSQGGPNTMANQAKNWLPGPCYRQQRVSTTTGQNNNSNIAWTAGTKYHLNGRNSLANPGIAMATHKDDKERFFPSNGILIFGKQNAARDNADYSDVMLTSEEEIKTTNPVATEEYGIVADNLQQQNTAPQIGTVNSQGALPGMVWQNRDVYLQGPIWAKIPHTDGNFHPSPLMGGFGLKHPPPQILIKNTPVPADPPTTFNQSKLNSFITQYSTGQVSVEIEWELQKENSKRWNPEIQYTSNYCKSTSVDFAVNTEGVYSEPHPIGTRYLTRPL

SEQ ID NO: 372 - protein, 737 aa, synthetic construct
MAADGYLPDWLEDTLSEGIRQWWKLKPGPPPPKPAERHKDDSRGLVLPGYKYLGPFNGLDKGEPVNEADAAALEHDKAYDRQLDSGDNPYLKYNHADAEFQERLKEDTSFGGNLGRAVFQAKKRLLEPLGLVEEAAKTAPGKKRPVEQSPQEPDSSSGIGKTGQQPAKKRLNFGQTGDTESVPDPQPIGEPPAAPSGVGSLTMASGGGAPVADNNEGADGVGSSSGNWHCDSQWLGDRVITTSTRTWALPTYNNHLYKQISNGTSGGATNDNTYFGYSTPWGYFDFNRFHCHFSPRDWQRLINNNWGFRPKRLSFKLFNIQVKEVTQNEGTKTIANNLTSTVQVFTDSEYQLPYVLGSAHQGCLPPFPADVFMIPQYGYLTLNNGSQAVGRSSFYCLEYFPSQMLRTGNNFQFTYTFEDVPFHSSYAHSQSLDRLMNPLIDQYLYYLSRTQTTGGTANTQTLGFSQGGPNTMANQAKNWLPGPCYRQQRVSTTTGQNNNSNFAWTRGTKYHLNGRNSLANPGIAMATHKDDKERFFPSNGILIFGKQNAARDNADYSDVMLTSEEEIKTTNPVATEEYGIVADNLQQQNTAPQIGTVNSQGALPGMVWQNRDVYLQGPIWAKIPHTDGNFHPSPLMGGFGLKHPPPQILIKNTPVPADPPTTFNQSKLNSFITQYSTGQVSVEIEWELQKENSKRWNPEIQYTSNYCKSTSVDFAVNTEGVYSEPHPIGTRYLTRPL

SEQ ID NO: 373 - protein, 737 aa, synthetic construct
MAADGYLPDWLEDTLSEGIRQWWKLKPGPPPPKPAERHKDDSRGLVLPGYKYLGPFNGLDKGEPVNEADAAALEHDKAYDRQLDSGDNPYLKYNHADAEFQERLKEDTSFGGNLGRAVFQAKKRLLEPLGLVEEAAKTAPGKKRPVEQSPQEPDSSSGIGKTGQQPAKKRLNFGQTGDTESVPDPQPIGEPPAAPSGVGSLTMASGGGAPVADNNEGADGVGSSSGNWHCDSQWLGDRVITTSTRTWALPTYNNHLYKQISNGTSGGATNDNTYFGYSTPWGYFDFNRFHCHFSPRDWQRLINNNWGFRPKRLSFKLFNIQVKEVTQNEGTKTIANNLTSTVQVFTDSEYQLPYVLGSAHQGCLPPFPADVFMIPQYGYLTLNNGSQAVGRSSFYCLEYFPSQMLRTGNNFQFTYTFEDVPFHSSYAHSQSLDRLMNPLIDQYLYYLSRTQTTGGTANTQTLGFSQGGPNTMANQAKNWLPGPCYRQQRVSTTTGQNNNSNIAWTRGTKYHLNGRNSLANPGIAMATHKDDKERFFPSNGILIFGKQNAARDNADYSDVMLTSEEEIKTTNPVATEEYGIVADNLQQQNTAPQIGTVNSQGALPGMVWQNRDVYLQGPIWAKIPHTDGNFHPSPLMGGFGLKHPPPQILIKNTPVPADPPTTFNQSKLNSFITQYSTGQVSVEIEWELQKENSKRWNPEIQYTSNYCKSTSVDFAVNTEGVYSEPHPIGTRYLTRPL

SEQ ID NO: 374 - protein, 737 aa, synthetic construct
MAADGYLPDWLEDTLSEGIRQWWKLKPGPPPPKPAERHKDDSRGLVLPGYKYLGPFNGLDKGEPVNEADAAALEHDKAYDRQLDSGDNPYLKYNHADAEFQERLKEDTSFGGNLGRAVFQAKKRLLEPLGLVEEAAKTAPGKKRPVEQSPQEPDSSSGIGKTGQQPAKKRLNFGQTGDTESVPDPQPIGEPPAAPSGVGSLTMASGGGAPVADNNEGADGVGSSSGNWHCDSQWLGDRVITTSTRTWALPTYNNHLYKQISNGTSGGATNDNTYFGYSTPWGYFDFNRFHCHFSPRDWQRLINNNWGFRPKRLSFKLFNIQVKEVTQNEGTKTIANNLTSTVQVFADSEYQLPYVLGSAHQGCLPPFPADVFMIPQYGYLTLNNGSQAVGRSSFYCLEYFPSQMLRTGNNFQFTYTFEDVPFHSSYAHSQSLDRLMNPLIDQYLYYLSRTQTTGGTANTQTLGFSQGGPNTMANQAKNWLPGPCYRQQRVSTTTGQNNNSNFAWTAGTKYHLNGRNSLANPGIAMATHKDDKERFFPSNGILIFGKQNAARDNADYSDVMLTSEEEIKTTNPVATEEYGIVADNLQQQNTAPQIGTVNSQGALPGMVWQNRDVYLQGPIWAKIPHTDGNFHPSPLMGGFGLKHPPPQILIKNTPVPADPPTTFNQSKLNSFITQYSTGQVSVEIEWELQKENSKRWNPEIQYTSNYYKSTSVDFAVNTEGVYSEPHPIGTRYLTRPL

SEQ ID NO: 375 - protein, 737 aa, synthetic construct
MAADGYLPDWLEDTLSEGIRQWWKLKPGPPPPKPAERHKDDSRGLVLPGYKYLGPFNGLDKGEPVNEADAAALEHDKAYDRQLDSGDNPYLKYNHADAEFQERLKEDTSFGGNLGRAVFQAKKRLLEPLGLVEEAAKTAPGKKRPVEQSPQEPDSSSGIGKTGQQPAKKRLNFGQTGDTESVPDPQPIGEPPAAPSGVGSLTMASGGGAPVADNNEGADGVGSSSGNWHCDSQWLGDRVITTSTRTWALPTYNNHLYKQISNGTSGGATNDNTYFGYSTPWGYFDFNRFHCHFSPRDWQRLINNNWGFRPKRLSFKLFNIQVKEVTQNEGTKTIANNLTSTVQVFADSEYQLPYVLGSAHQGCLPPFPADVFMIPQYGYLTLNNGSQAVGRSSFYCLEYFPSQMLRTGNNFQFTYTFEDVPFHSSYAHSQSLDRLMNPLIDQYLYYLSRTQTTGGTANTQTLGFSQGGPNTMANQAKNWLPGPCYRQQRVSTTTGQNNNSNIAWTAGTKYHLNGRNSLANPGIAMATHKDDKERFFPSNGILIFGKQNAARDNADYSDVMLTSEEEIKTTNPVATEEYGIVADNLQQQNTAPQIGTVNSQGALPGMVWQNRDVYLQGPIWAKIPHTDGNFHPSPLMGGFGLKHPPPQILIKNTPVPADPPTTFNQSKLNSFITQYSTGQVSVEIEWELQKENSKRWNPEIQYTSNYYKSTSVDFAVNTEGVYSEPHPIGTRYLTRPL

SEQ ID NO: 376 - protein, 737 aa, synthetic construct
MAADGYLPDWLEDTLSEGIRQWWKLKPGPPPPKPAERHKDDSRGLVLPGYKYLGPFNGLDKGEPVNEADAAALEHDKAYDRQLDSGDNPYLKYNHADAEFQERLKEDTSFGGNLGRAVFQAKKRLLEPLGLVEEAAKTAPGKKRPVEQSPQEPDSSSGIGKTGQQPAKKRLNFGQTGDTESVPDPQPIGEPPAAPSGVGSLTMASGGGAPVADNNEGADGVGSSSGNWHCDSQWLGDRVITTSTRTWALPTYNNHLYKQISNGTSGGATNDNTYFGYSTPWGYFDFNRFHCHFSPRDWQRLINNNWGFRPKRLSFKLFNIQVKEVTQNEGTKTIANNLTSTVQVFADSEYQLPYVLGSAHQGCLPPFPADVFMIPQYGYLTLNNGSQAVGRSSFYCLEYFPSQMLRTGNNFQFTYTFEDVPFHSSYAHSQSLDRLMNPLIDQYLYYLSRTQTTGGTANTQTLGFSQGGPNTMANQAKNWLPGPCYRQQRVSTTTGQNNNSNFAWTRGTKYHLNGRNSLANPGIAMATHKDDKERFFPSNGILIFGKQNAARDNADYSDVMLTSEEEIKTTNPVATEEYGIVADNLQQQNTAPQIGTVNSQGALPGMVWQNRDVYLQGPIWAKIPHTDGNFHPSPLMGGFGLKHPPPQILIKNTPVPADPPTTFNQSKLNSFITQYSTGQVSVEIEWELQKENSKRWNPEIQYTSNYYKSTSVDFAVNTEGVYSEPHPIGTRYLTRPL

SEQ ID NO: 377 - protein, 737 aa, synthetic construct
MAADGYLPDWLEDTLSEGIRQWWKLKPGPPPPKPAERHKDDSRGLVLPGYKYLGPFNGLDKGEPVNEADAAALEHDKAYDRQLDSGDNPYLKYNHADAEFQERLKEDTSFGGNLGRAVFQAKKRLLEPLGLVEEAAKTAPGKKRPVEQSPQEPDSSSGIGKTGQQPAKKRLNFGQTGDTESVPDPQPIGEPPAAPSGVGSLTMASGGGAPVADNNEGADGVGSSSGNWHCDSQWLGDRVITTSTRTWALPTYNNHLYKQISNGTSGGATNDNTYFGYSTPWGYFDFNRFHCHFSPRDWQRLINNNWGFRPKRLSFKLFNIQVKEVTQNEGTKTIANNLTSTVQVFADSEYQLPYVLGSAHQGCLPPFPADVFMIPQYGYLTLNNGSQAVGRSSFYCLEYFPSQMLRTGNNFQFTYTFEDVPFHSSYAHSQSLDRLMNPLIDQYLYYLSRTQTTGGTANTQTLGFSQGGPNTMANQAKNWLPGPCYRQQRVSTTTGQNNNSNFAWTAGTKYHLNGRNSLANPGIAMATHKDDKERFFPSNGILIFGKQNAARDNADYSDVMLTSEEEIKTTNPVATEEYGIVADNLQQQNTAPQIGTVNSQGALPGMVWQNRDVYLQGPIWAKIPHTDGNFHPSPLMGGFGLKHPPPQILIKNTPVPADPPTTFNQSKLNSFITQYSTGQVSVEIEWELQKENSKRWNPEIQYTSNYCKSTSVDFAVNTEGVYSEPHPIGTRYLTRPL

SEQ ID NO: 378 - protein, 737 aa, synthetic construct
MAADGYLPDWLEDTLSEGIRQWWKLKPGPPPPKPAERHKDDSRGLVLPGYKYLGPFNGLDKGEPVNEADAAALEHDKAYDRQLDSGDNPYLKYNHADAEFQERLKEDTSFGGNLGRAVFQAKKRLLEPLGLVEEAAKTAPGKKRPVEQSPQEPDSSSGIGKTGQQPAKKRLNFGQTGDTESVPDPQPIGEPPAAPSGVGSLTMASGGGAPVADNNEGADGVGSSSGNWHCDSQWLGDRVITTSTRTWALPTYNNHLYKQISNGTSGGATNDNTYFGYSTPWGYFDFNRFHCHFSPRDWQRLINNNWGFRPKRLSFKLFNIQVKEVTQNEGTKTIANNLTSTVQVFADSEYQLPYVLGSAHQGCLPPFPADVFMIPQYGYLTLNNGSQAVGRSSFYCLEYFPSQMLRTGNNFQFTYTFEDVPFHSSYAHSQSLDRLMNPLIDQYLYYLSRTQTTGGTANTQTLGFSQGGPNTMANQAKNWLPGPCYRQQRVSTTTGQNNNSNIAWTRGTKYHLNGRNSLANPGIAMATHKDDKERFFPSNGILIFGKQNAARDNADYSDVMLTSEEEIKTTNPVATEEYGIVADNLQQQNTAPQIGTVNSQGALPGMVWQNRDVYLQGPIWAKIPHTDGNFHPSPLMGGFGLKHPPPQILIKNTPVPADPPTTFNQSKLNSFITQYSTGQVSVEIEWELQKENSKRWNPEIQYTSNYYKSTSVDFAVNTEGVYSEPHPIGTRYLTRPL

SEQ ID NO: 379 - protein, 737 aa, synthetic construct
MAADGYLPDWLEDTLSEGIRQWWKLKPGPPPPKPAERHKDDSRGLVLPGYKYLGPFNGLDKGEPVNEADAAALEHDKAYDRQLDSGDNPYLKYNHADAEFQERLKEDTSFGGNLGRAVFQAKKRLLEPLGLVEEAAKTAPGKKRPVEQSPQEPDSSSGIGKTGQQPAKKRLNFGQTGDTESVPDPQPIGEPPAAPSGVGSLTMASGGGAPVADNNEGADGVGSSSGNWHCDSQWLGDRVITTSTRTWALPTYNNHLYKQISNGTSGGATNDNTYFGYSTPWGYFDFNRFHCHFSPRDWQRLINNNWGFRPKRLSFKLFNIQVKEVTQNEGTKTIANNLTSTVQVFADSEYQLPYVLGSAHQGCLPPFPADVFMIPQYGYLTLNNGSQAVGRSSFYCLEYFPSQMLRTGNNFQFTYTFEDVPFHSSYAHSQSLDRLMNPLIDQYLYYLSRTQTTGGTANTQTLGFSQGGPNTMANQAKNWLPGPCYRQQRVSTTTGQNNNSNIAWTAGTKYHLNGRNSLANPGIAMATHKDDKERFFPSNGILIFGKQNAARDNADYSDVMLTSEEEIKTTNPVATEEYGIVADNLQQQNTAPQIGTVNSQGALPGMVWQNRDVYLQGPIWAKIPHTDGNFHPSPLMGGFGLKHPPPQILIKNTPVPADPPTTFNQSKLNSFITQYSTGQVSVEIEWELQKENSKRWNPEIQYTSNYCKSTSVDFAVNTEGVYSEPHPIGTRYLTRPL

SEQ ID NO: 380 - protein, 737 aa, synthetic construct
MAADGYLPDWLEDTLSEGIRQWWKLKPGPPPPKPAERHKDDSRGLVLPGYKYLGPFNGLDKGEPVNEADAAALEHDKAYDRQLDSGDNPYLKYNHADAEFQERLKEDTSFGGNLGRAVFQAKKRLLEPLGLVEEAAKTAPGKKRPVEQSPQEPDSSSGIGKTGQQPAKKRLNFGQTGDTESVPDPQPIGEPPAAPSGVGSLTMASGGGAPVADNNEGADGVGSSSGNWHCDSQWLGDRVITTSTRTWALPTYNNHLYKQISNGTSGGATNDNTYFGYSTPWGYFDFNRFHCHFSPRDWQRLINNNWGFRPKRLSFKLFNIQVKEVTQNEGTKTIANNLTSTVQVFADSEYQLPYVLGSAHQGCLPPFPADVFMIPQYGYLTLNNGSQAVGRSSFYCLEYFPSQMLRTGNNFQFTYTFEDVPFHSSYAHSQSLDRLMNPLIDQYLYYLSRTQTTGGTANTQTLGFSQGGPNTMANQAKNWLPGPCYRQQRVSTTTGQNNNSNFAWTRGTKYHLNGRNSLANPGIAMATHKDDKERFFPSNGILIFGKQNAARDNADYSDVMLTSEEEIKTTNPVATEEYGIVADNLQQQNTAPQIGTVNSQGALPGMVWQNRDVYLQGPIWAKIPHTDGNFHPSPLMGGFGLKHPPPQILIKNTPVPADPPTTFNQSKLNSFITQYSTGQVSVEIEWELQKENSKRWNPEIQYTSNYCKSTSVDFAVNTEGVYSEPHPIGTRYLTRPL

SEQ ID NO: 381 - protein, 737 aa, synthetic construct
MAADGYLPDWLEDTLSEGIRQWWKLKPGPPPPKPAERHKDDSRGLVLPGYKYLGPFNGLDKGEPVNEADAAALEHDKAYDRQLDSGDNPYLKYNHADAEFQERLKEDTSFGGNLGRAVFQAKKRLLEPLGLVEEAAKTAPGKKRPVEQSPQEPDSSSGIGKTGQQPAKKRLNFGQTGDTESVPDPQPIGEPPAAPSGVGSLTMASGGGAPVADNNEGADGVGSSSGNWHCDSQWLGDRVITTSTRTWALPTYNNHLYKQISNGTSGGATNDNTYFGYSTPWGYFDFNRFHCHFSPRDWQRLINNNWGFRPKRLSFKLFNIQVKEVTQNEGTKTIANNLTSTVQVFADSEYQLPYVLGSAHQGCLPPFPADVFMIPQYGYLTLNNGSQAVGRSSFYCLEYFPSQMLRTGNNFQFTYTFEDVPFHSSYAHSQSLDRLMNPLIDQYLYYLSRTQTTGGTANTQTLGFSQGGPNTMANQAKNWLPGPCYRQQRVSTTTGQNNNSNIAWTRGTKYHLNGRNSLANPGIAMATHKDDKERFFPSNGILIFGKQNAARDNADYSDVMLTSEEEIKTTNPVATEEYGIVADNLQQQNTAPQIGTVNSQGALPGMVWQNRDVYLQGPIWAKIPHTDGNFHPSPLMGGFGLKHPPPQILIKNTPVPADPPTTFNQSKLNSFITQYSTGQVSVEIEWELQKENSKRWNPEIQYTSNYCKSTSVDFAVNTEGVYSEPHPIGTRYLTRPL

SEQ ID NO: 382 - protein, 738 aa, synthetic construct
MAADGYLPDWLEDNLSEGIREWWDLKPGAPKPKANQQKQDDGRGLVLPGYKYLGPFNGLDKGEPVNAADAAALEHDKAYDQQLKAGDNPYLRYNHADAEFQERLQEDTSFGGNLGRAVFQAKKRVLEPLGLVEEGAKTAPGKKRPVEPSPQRSPDSSTGIGKKGQQPAKKRLNFGQTGDSESVPDPQPIGEPPAGPSGLGSGTMAAGGGAPMADNNEGADGVGSSSGNWHCDSTWLGDRVITTSTRTWALPTYNNHLYKQISNGTSGGSTNDNTYFGYSTPWGYFDFNRFHCHFSPRDWQRLINNNWGFRPKRLNFKLFNIQVKEVTQNEGTKTIANNLTSTIQVFTDSEYQLPYVLGSAHQGCLPPFPADVFMIPQYGYLTLNNGSQAVGRSSFYCLEYFPSQMLRTGNNFEFSYQFEDVPFHSSYAHSQSLDRLMNPLIDQYLYYLSRTQSTGGTAGTQQLLFSQAGPNNMSAQAKNWLPGPCYRQQRVSTTLSQNNNSNIAWTGATKYHLNGRDSLVNPGVAMATHKDDEERFFPSSGVLMFGKQGAGKDNVDYSSVMLTSEEEIKTTNPVATEQYGVVADNLQQQNAAPIVGAVNSQGALPGMVWQNRDVYLQGPIWAKIPHTDGNFHPSPLMGGFGLKHPPPQILIKNTPVPADPPTTFSQAKLASFITQYSTGQVSVEIEWELQKENSKRWNPEIQYTSNYYKSTNVDFAVNTDGTYSEPRPIGTRYLTRNL

SEQ ID NO: 383 - protein, 738 aa, synthetic construct
MAADGYLPDWLEDNLSEGIREWWDLKPGAPKPKANQQKQDDGRGLVLPGYKYLGPFNGLDKGEPVNAADAAALEHDKAYDQQLKAGDNPYLRYNHADAEFQERLQEDTSFGGNLGRAVFQAKKRVLEPLGLVEEGAKTAPGKKRPVEPSPQRSPDSSTGIGKKGQQPAKKRLNFGQTGDSESVPDPQPIGEPPAGPSGLGSGTMAAGGGAPMADNNEGADGVGSSSGNWHCDSTWLGDRVITTSTRTWALPTYNNHLYKQISNGTSGGSTNDNTYFGYSTPWGYFDFNRFHCHFSPRDWQRLINNNWGFRPKRLNFKLFNIQVKEVTQNEGTKTIANNLTSTIQVFTDSEYQLPYVLGSAHQGCLPPFPADVFMIPQYGYLTLNNGSQAVGRSSFYCLEYFPSQMLRTGNNFEFSYQFEDVPFHSSYAHSQSLDRLMNPLIDQYLYYLSRTQSTGGTAGTQQLLFSQAGPNNMSAQAKNWLPGPCYRQQRVSTTLSQNNNSNFAWTRATKYHLNGRDSLVNPGVAMATHKDDEERFFPSSGVLMFGKQGAGKDNVDYSSVMLTSEEEIKTTNPVATEQYGVVADNLQQQNAAPIVGAVNSQGALPGMVWQNRDVYLQGPIWAKIPHTDGNFHPSPLMGGFGLKHPPPQILIKNTPVPADPPTTFSQAKLASFITQYSTGQVSVEIEWELQKENSKRWNPEIQYTSNYYKSTNVDFAVNTDGTYSEPRPIGTRYLTRNL

SEQ ID NO: 384 - protein, 738 aa, synthetic construct
MAADGYLPDWLEDNLSEGIREWWDLKPGAPKPKANQQKQDDGRGLVLPGYKYLGPFNGLDKGEPVNAADAAALEHDKAYDQQLKAGDNPYLRYNHADAEFQERLQEDTSFGGNLGRAVFQAKKRVLEPLGLVEEGAKTAPGKKRPVEPSPQRSPDSSTGIGKKGQQPAKKRLNFGQTGDSESVPDPQPIGEPPAGPSGLGSGTMAAGGGAPMADNNEGADGVGSSSGNWHCDSTWLGDRVITTSTRTWALPTYNNHLYKQISNGTSGGSTNDNTYFGYSTPWGYFDFNRFHCHFSPRDWQRLINNNWGFRPKRLNFKLFNIQVKEVTQNEGTKTIANNLTSTIQVFTDSEYQLPYVLGSAHQGCLPPFPADVFMIPQYGYLTLNNGSQAVGRSSFYCLEYFPSQMLRTGNNFEFSYQFEDVPFHSSYAHSQSLDRLMNPLIDQYLYYLSRTQSTGGTAGTQQLLFSQAGPNNMSAQAKNWLPGPCYRQQRVSTTLSQNNNSNFAWTGATKYHLNGRDSLVNPGVAMATHKDDEERFFPSSGVLMFGKQGAGKDNVDYSSVMLTSEEEIKTTNPVATEQYGVVADNLQQQNAAPIVGAVNSQGALPGMVWQNRDVYLQGPIWAKIPHTDGNFHPSPLMGGFGLKHPPPQILIKNTPVPADPPTTFSQAKLASFITQYSTGQVSVEIEWELQKENSKRWNPEIQYTSNYCKSTNVDFAVNTDGTYSEPRPIGTRYLTRNL

SEQ ID NO: 385 - protein, 738 aa, synthetic construct
MAADGYLPDWLEDNLSEGIREWWDLKPGAPKPKANQQKQDDGRGLVLPGYKYLGPFNGLDKGEPVNAADAAALEHDKAYDQQLKAGDNPYLRYNHADAEFQERLQEDTSFGGNLGRAVFQAKKRVLEPLGLVEEGAKTAPGKKRPVEPSPQRSPDSSTGIGKKGQQPAKKRLNFGQTGDSESVPDPQPIGEPPAGPSGLGSGTMAAGGGAPMADNNEGADGVGSSSGNWHCDSTWLGDRVITTSTRTWALPTYNNHLYKQISNGTSGGSTNDNTYFGYSTPWGYFDFNRFHCHFSPRDWQRLINNNWGFRPKRLNFKLFNIQVKEVTQNEGTKTIANNLTSTIQVFTDSEYQLPYVLGSAHQGCLPPFPADVFMIPQYGYLTLNNGSQAVGRSSFYCLEYFPSQMLRTGNNFEFSYQFEDVPFHSSYAHSQSLDRLMNPLIDQYLYYLSRTQSTGGTAGTQQLLFSQAGPNNMSAQAKNWLPGPCYRQQRVSTTLSQNNNSNIAWTRATKYHLNGRDSLVNPGVAMATHKDDEERFFPSSGVLMFGKQGAGKDNVDYSSVMLTSEEEIKTTNPVATEQYGVVADNLQQQNAAPIVGAVNSQGALPGMVWQNRDVYLQGPIWAKIPHTDGNFHPSPLMGGFGLKHPPPQILIKNTPVPADPPTTFSQAKLASFITQYSTGQVSVEIEWELQKENSKRWNPEIQYTSNYYKSTNVDFAVNTDGTYSEPRPIGTRYLTRNL

SEQ ID NO: 386 - protein, 738 aa, synthetic construct
MAADGYLPDWLEDNLSEGIREWWDLKPGAPKPKANQQKQDDGRGLVLPGYKYLGPFNGLDKGEPVNAADAAALEHDKAYDQQLKAGDNPYLRYNHADAEFQERLQEDTSFGGNLGRAVFQAKKRVLEPLGLVEEGAKTAPGKKRPVEPSPQRSPDSSTGIGKKGQQPAKKRLNFGQTGDSESVPDPQPIGEPPAGPSGLGSGTMAAGGGAPMADNNEGADGVGSSSGNWHCDSTWLGDRVITTSTRTWALPTYNNHLYKQISNGTSGGSTNDNTYFGYSTPWGYFDFNRFHCHFSPRDWQRLINNNWGFRPKRLNFKLFNIQVKEVTQNEGTKTIANNLTSTIQVFTDSEYQLPYVLGSAHQGCLPPFPADVFMIPQYGYLTLNNGSQAVGRSSFYCLEYFPSQMLRTGNNFEFSYQFEDVPFHSSYAHSQSLDRLMNPLIDQYLYYLSRTQSTGGTAGTQQLLFSQAGPNNMSAQAKNWLPGPCYRQQRVSTTLSQNNNSNIAWTGATKYHLNGRDSLVNPGVAMATHKDDEERFFPSSGVLMFGKQGAGKDNVDYSSVMLTSEEEIKTTNPVATEQYGVVADNLQQQNAAPIVGAVNSQGALPGMVWQNRDVYLQGPIWAKIPHTDGNFHPSPLMGGFGLKHPPPQILIKNTPVPADPPTTFSQAKLASFITQYSTGQVSVEIEWELQKENSKRWNPEIQYTSNYCKSTNVDFAVNTDGTYSEPRPIGTRYLTRNL

SEQ ID NO: 387 - protein, 738 aa, synthetic construct
MAADGYLPDWLEDNLSEGIREWWDLKPGAPKPKANQQKQDDGRGLVLPGYKYLGPFNGLDKGEPVNAADAAALEHDKAYDQQLKAGDNPYLRYNHADAEFQERLQEDTSFGGNLGRAVFQAKKRVLEPLGLVEEGAKTAPGKKRPVEPSPQRSPDSSTGIGKKGQQPAKKRLNFGQTGDSESVPDPQPIGEPPAGPSGLGSGTMAAGGGAPMADNNEGADGVGSSSGNWHCDSTWLGDRVITTSTRTWALPTYNNHLYKQISNGTSGGSTNDNTYFGYSTPWGYFDFNRFHCHFSPRDWQRLINNNWGFRPKRLNFKLFNIQVKEVTQNEGTKTIANNLTSTIQVFTDSEYQLPYVLGSAHQGCLPPFPADVFMIPQYGYLTLNNGSQAVGRSSFYCLEYFPSQMLRTGNNFEFSYQFEDVPFHSSYAHSQSLDRLMNPLIDQYLYYLSRTQSTGGTAGTQQLLFSQAGPNNMSAQAKNWLPGPCYRQQRVSTTLSQNNNSNFAWTRATKYHLNGRDSLVNPGVAMATHKDDEERFFPSSGVLMFGKQGAGKDNVDYSSVMLTSEEEIKTTNPVATEQYGVVADNLQQQNAAPIVGAVNSQGALPGMVWQNRDVYLQGPIWAKIPHTDGNFHPSPLMGGFGLKHPPPQILIKNTPVPADPPTTFSQAKLASFITQYSTGQVSVEIEWELQKENSKRWNPEIQYTSNYCKSTNVDFAVNTDGTYSEPRPIGTRYLTRNL

SEQ ID NO: 388 - protein, 738 aa, synthetic construct
MAADGYLPDWLEDNLSEGIREWWDLKPGAPKPKANQQKQDDGRGLVLPGYKYLGPFNGLDKGEPVNAADAAALEHDKAYDQQLKAGDNPYLRYNHADAEFQERLQEDTSFGGNLGRAVFQAKKRVLEPLGLVEEGAKTAPGKKRPVEPSPQRSPDSSTGIGKKGQQPAKKRLNFGQTGDSESVPDPQPIGEPPAGPSGLGSGTMAAGGGAPMADNNEGADGVGSSSGNWHCDSTWLGDRVITTSTRTWALPTYNNHLYKQISNGTSGGSTNDNTYFGYSTPWGYFDFNRFHCHFSPRDWQRLINNNWGFRPKRLNFKLFNIQVKEVTQNEGTKTIANNLTSTIQVFTDSEYQLPYVLGSAHQGCLPPFPADVFMIPQYGYLTLNNGSQAVGRSSFYCLEYFPSQMLRTGNNFEFSYQFEDVPFHSSYAHSQSLDRLMNPLIDQYLYYLSRTQSTGGTAGTQQLLFSQAGPNNMSAQAKNWLPGPCYRQQRVSTTLSQNNNSNIAWTRATKYHLNGRDSLVNPGVAMATHKDDEERFFPSSGVLMFGKQGAGKDNVDYSSVMLTSEEEIKTTNPVATEQYGVVADNLQQQNAAPIVGAVNSQGALPGMVWQNRDVYLQGPIWAKIPHTDGNFHPSPLMGGFGLKHPPPQILIKNTPVPADPPTTFSQAKLASFITQYSTGQVSVEIEWELQKENSKRWNPEIQYTSNYCKSTNVDFAVNTDGTYSEPRPIGTRYLTRNL

SEQ ID NO: 389 - protein, 738 aa, synthetic construct
MAADGYLPDWLEDNLSEGIREWWDLKPGAPKPKANQQKQDDGRGLVLPGYKYLGPFNGLDKGEPVNAADAAALEHDKAYDQQLKAGDNPYLRYNHADAEFQERLQEDTSFGGNLGRAVFQAKKRVLEPLGLVEEGAKTAPGKKRPVEPSPQRSPDSSTGIGKKGQQPAKKRLNFGQTGDSESVPDPQPIGEPPAGPSGLGSGTMAAGGGAPMADNNEGADGVGSSSGNWHCDSTWLGDRVITTSTRTWALPTYNNHLYKQISNGTSGGSTNDNTYFGYSTPWGYFDFNRFHCHFSPRDWQRLINNNWGFRPKRLNFKLFNIQVKEVTQNEGTKTIANNLTSTIQVFADSEYQLPYVLGSAHQGCLPPFPADVFMIPQYGYLTLNNGSQAVGRSSFYCLEYFPSQMLRTGNNFEFSYQFEDVPFHSSYAHSQSLDRLMNPLIDQYLYYLSRTQSTGGTAGTQQLLFSQAGPNNMSAQAKNWLPGPCYRQQRVSTTLSQNNNSNFAWTGATKYHLNGRDSLVNPGVAMATHKDDEERFFPSSGVLMFGKQGAGKDNVDYSSVMLTSEEEIKTTNPVATEQYGVVADNLQQQNAAPIVGAVNSQGALPGMVWQNRDVYLQGPIWAKIPHTDGNFHPSPLMGGFGLKHPPPQILIKNTPVPADPPTTFSQAKLASFITQYSTGQVSVEIEWELQKENSKRWNPEIQYTSNYYKSTNVDFAVNTDGTYSEPRPIGTRYLTRNL

SEQ ID NO: 390 - protein, 738 aa, synthetic construct
MAADGYLPDWLEDNLSEGIREWWDLKPGAPKPKANQQKQDDGRGLVLPGYKYLGPFNGLDKGEPVNAADAAALEHDKAYDQQLKAGDNPYLRYNHADAEFQERLQEDTSFGGNLGRAVFQAKKRVLEPLGLVEEGAKTAPGKKRPVEPSPQRSPDSSTGIGKKGQQPAKKRLNFGQTGDSESVPDPQPIGEPPAGPSGLGSGTMAAGGGAPMADNNEGADGVGSSSGNWHCDSTWLGDRVITTSTRTWALPTYNNHLYKQISNGTSGGSTNDNTYFGYSTPWGYFDFNRFHCHFSPRDWQRLINNNWGFRPKRLNFKLFNIQVKEVTQNEGTKTIANNLTSTIQVFADSEYQLPYVLGSAHQGCLPPFPADVFMIPQYGYLTLNNGSQAVGRSSFYCLEYFPSQMLRTGNNFEFSYQFEDVPFHSSYAHSQSLDRLMNPLIDQYLYYLSRTQSTGGTAGTQQLLFSQAGPNNMSAQAKNWLPGPCYRQQRVSTTLSQNNNSNIAWTGATKYHLNGRDSLVNPGVAMATHKDDEERFFPSSGVLMFGKQGAGKDNVDYSSVMLTSEEEIKTTNPVATEQYGVVADNLQQQNAAPIVGAVNSQGALPGMVWQNRDVYLQGPIWAKIPHTDGNFHPSPLMGGFGLKHPPPQILIKNTPVPADPPTTFSQAKLASFITQYSTGQVSVEIEWELQKENSKRWNPEIQYTSNYYKSTNVDFAVNTDGTYSEPRPIGTRYLTRNL

SEQ ID NO: 391 - protein, 738 aa, synthetic construct
MAADGYLPDWLEDNLSEGIREWWDLKPGAPKPKANQQKQDDGRGLVLPGYKYLGPFNGLDKGEPVNAADAAALEHDKAYDQQLKAGDNPYLRYNHADAEFQERLQEDTSFGGNLGRAVFQAKKRVLEPLGLVEEGAKTAPGKKRPVEPSPQRSPDSSTGIGKKGQQPAKKRLNFGQTGDSESVPDPQPIGEPPAGPSGLGSGTMAAGGGAPMADNNEGADGVGSSSGNWHCDSTWLGDRVITTSTRTWALPTYNNHLYKQISNGTSGGSTNDNTYFGYSTPWGYFDFNRFHCHFSPRDWQRLINNNWGFRPKRLNFKLFNIQVKEVTQNEGTKTIANNLTSTIQVFADSEYQLPYVLGSAHQGCLPPFPADVFMIPQYGYLTLNNGSQAVGRSSFYCLEYFPSQMLRTGNNFEFSYQFEDVPFHSSYAHSQSLDRLMNPLIDQYLYYLSRTQSTGGTAGTQQLLFSQAGPNNMSAQAKNWLPGPCYRQQRVSTTLSQNNNSNFAWTRATKYHLNGRDSLVNPGVAMATHKDDEERFFPSSGVLMFGKQGAGKDNVDYSSVMLTSEEEIKTTNPVATEQYGVVADNLQQQNAAPIVGAVNSQGALPGMVWQNRDVYLQGPIWAKIPHTDGNFHPSPLMGGFGLKHPPPQILIKNTPVPADPPTTFSQAKLASFITQYSTGQVSVEIEWELQKENSKRWNPEIQYTSNYYKSTNVDFAVNTDGTYSEPRPIGTRYLTRNL

SEQ ID NO: 392 - protein, 738 aa, synthetic construct
MAADGYLPDWLEDNLSEGIREWWDLKPGAPKPKANQQKQDDGRGLVLPGYKYLGPFNGLDKGEPVNAADAAALEHDKAYDQQLKAGDNPYLRYNHADAEFQERLQEDTSFGGNLGRAVFQAKKRVLEPLGLVEEGAKTAPGKKRPVEPSPQRSPDSSTGIGKKGQQPAKKRLNFGQTGDSESVPDPQPIGEPPAGPSGLGSGTMAAGGGAPMADNNEGADGVGSSSGNWHCDSTWLGDRVITTSTRTWALPTYNNHLYKQISNGTSGGSTNDNTYFGYSTPWGYFDFNRFHCHFSPRDWQRLINNNWGFRPKRLNFKLFNIQVKEVTQNEGTKTIANNLTSTIQVFADSEYQLPYVLGSAHQGCLPPFPADVFMIPQYGYLTLNNGSQAVGRSSFYCLEYFPSQMLRTGNNFEFSYQFEDVPFHSSYAHSQSLDRLMNPLIDQYLYYLSRTQSTGGTAGTQQLLFSQAGPNNMSAQAKNWLPGPCYRQQRVSTTLSQNNNSNFAWTGATKYHLNGRDSLVNPGVAMATHKDDEERFFPSSGVLMFGKQGAGKDNVDYSSVMLTSEEEIKTTNPVATEQYGVVADNLQQQNAAPIVGAVNSQGALPGMVWQNRDVYLQGPIWAKIPHTDGNFHPSPLMGGFGLKHPPPQILIKNTPVPADPPTTFSQAKLASFITQYSTGQVSVEIEWELQKENSKRWNPEIQYTSNYCKSTNVDFAVNTDGTYSEPRPIGTRYLTRNL

SEQ ID NO: 393 - protein, 738 aa, synthetic construct
MAADGYLPDWLEDNLSEGIREWWDLKPGAPKPKANQQKQDDGRGLVLPGYKYLGPFNGLDKGEPVNAADAAALEHDKAYDQQLKAGDNPYLRYNHADAEFQERLQEDTSFGGNLGRAVFQAKKRVLEPLGLVEEGAKTAPGKKRPVEPSPQRSPDSSTGIGKKGQQPAKKRLNFGQTGDSESVPDPQPIGEPPAGPSGLGSGTMAAGGGAPMADNNEGADGVGSSSGNWHCDSTWLGDRVITTSTRTWALPTYNNHLYKQISNGTSGGSTNDNTYFGYSTPWGYFDFNRFHCHFSPRDWQRLINNNWGFRPKRLNFKLFNIQVKEVTQNEGTKTIANNLTSTIQVFADSEYQLPYVLGSAHQGCLPPFPADVFMIPQYGYLTLNNGSQAVGRSSFYCLEYFPSQMLRTGNNFEFSYQFEDVPFHSSYAHSQSLDRLMNPLIDQYLYYLSRTQSTGGTAGTQQLLFSQAGPNNMSAQAKNWLPGPCYRQQRVSTTLSQNNNSNIAWTRATKYHLNGRDSLVNPGVAMATHKDDEERFFPSSGVLMFGKQGAGKDNVDYSSVMLTSEEEIKTTNPVATEQYGVVADNLQQQNAAPIVGAVNSQGALPGMVWQNRDVYLQGPIWAKIPHTDGNFHPSPLMGGFGLKHPPPQILIKNTPVPADPPTTFSQAKLASFITQYSTGQVSVEIEWELQKENSKRWNPEIQYTSNYYKSTNVDFAVNTDGTYSEPRPIGTRYLTRNL

SEQ ID NO: 394 - protein, 738 aa, synthetic construct
MAADGYLPDWLEDNLSEGIREWWDLKPGAPKPKANQQKQDDGRGLVLPGYKYLGPFNGLDKGEPVNAADAAALEHDKAYDQQLKAGDNPYLRYNHADAEFQERLQEDTSFGGNLGRAVFQAKKRVLEPLGLVEEGAKTAPGKKRPVEPSPQRSPDSSTGIGKKGQQPAKKRLNFGQTGDSESVPDPQPIGEPPAGPSGLGSGTMAAGGGAPMADNNEGADGVGSSSGNWHCDSTWLGDRVITTSTRTWALPTYNNHLYKQISNGTSGGSTNDNTYFGYSTPWGYFDFNRFHCHFSPRDWQRLINNNWGFRPKRLNFKLFNIQVKEVTQNEGTKTIANNLTSTIQVFADSEYQLPYVLGSAHQGCLPPFPADVFMIPQYGYLTLNNGSQAVGRSSFYCLEYFPSQMLRTGNNFEFSYQFEDVPFHSSYAHSQSLDRLMNPLIDQYLYYLSRTQSTGGTAGTQQLLFSQAGPNNMSAQAKNWLPGPCYRQQRVSTTLSQNNNSNIAWTGATKYHLNGRDSLVNPGVAMATHKDDEERFFPSSGVLMFGKQGAGKDNVDYSSVMLTSEEEIKTTNPVATEQYGVVADNLQQQNAAPIVGAVNSQGALPGMVWQNRDVYLQGPIWAKIPHTDGNFHPSPLMGGFGLKHPPPQILIKNTPVPADPPTTFSQAKLASFITQYSTGQVSVEIEWELQKENSKRWNPEIQYTSNYCKSTNVDFAVNTDGTYSEPRPIGTRYLTRNL

SEQ ID NO: 395 - protein, 738 aa, synthetic construct
MAADGYLPDWLEDNLSEGIREWWDLKPGAPKPKANQQKQDDGRGLVLPGYKYLGPFNGLDKGEPVNAADAAALEHDKAYDQQLKAGDNPYLRYNHADAEFQERLQEDTSFGGNLGRAVFQAKKRVLEPLGLVEEGAKTAPGKKRPVEPSPQRSPDSSTGIGKKGQQPAKKRLNFGQTGDSESVPDPQPIGEPPAGPSGLGSGTMAAGGGAPMADNNEGADGVGSSSGNWHCDSTWLGDRVITTSTRTWALPTYNNHLYKQISNGTSGGSTNDNTYFGYSTPWGYFDFNRFHCHFSPRDWQRLINNNWGFRPKRLNFKLFNIQVKEVTQNEGTKTIANNLTSTIQVFADSEYQLPYVLGSAHQGCLPPFPADVFMIPQYGYLTLNNGSQAVGRSSFYCLEYFPSQMLRTGNNFEFSYQFEDVPFHSSYAHSQSLDRLMNPLIDQYLYYLSRTQSTGGTAGTQQLLFSQAGPNNMSAQAKNWLPGPCYRQQRVSTTLSQNNNSNFAWTRATKYHLNGRDSLVNPGVAMATHKDDEERFFPSSGVLMFGKQGAGKDNVDYSSVMLTSEEEIKTTNPVATEQYGVVADNLQQQNAAPIVGAVNSQGALPGMVWQNRDVYLQGPIWAKIPHTDGNFHPSPLMGGFGLKHPPPQILIKNTPVPADPPTTFSQAKLASFITQYSTGQVSVEIEWELQKENSKRWNPEIQYTSNYCKSTNVDFAVNTDGTYSEPRPIGTRYLTRNL

SEQ ID NO: 396 - protein, 738 aa, synthetic construct
MAADGYLPDWLEDNLSEGIREWWDLKPGAPKPKANQQKQDDGRGLVLPGYKYLGPFNGLDKGEPVNAADAAALEHDKAYDQQLKAGDNPYLRYNHADAEFQERLQEDTSFGGNLGRAVFQAKKRVLEPLGLVEEGAKTAPGKKRPVEPSPQRSPDSSTGIGKKGQQPAKKRLNFGQTGDSESVPDPQPIGEPPAGPSGLGSGTMAAGGGAPMADNNEGADGVGSSSGNWHCDSTWLGDRVITTSTRTWALPTYNNHLYKQISNGTSGGSTNDNTYFGYSTPWGYFDFNRFHCHFSPRDWQRLINNNWGFRPKRLNFKLFNIQVKEVTQNEGTKTIANNLTSTIQVFADSEYQLPYVLGSAHQGCLPPFPADVFMIPQYGYLTLNNGSQAVGRSSFYCLEYFPSQMLRTGNNFEFSYQFEDVPFHSSYAHSQSLDRLMNPLIDQYLYYLSRTQSTGGTAGTQQLLFSQAGPNNMSAQAKNWLPGPCYRQQRVSTTLSQNNNSNIAWTRATKYHLNGRDSLVNPGVAMATHKDDEERFFPSSGVLMFGKQGAGKDNVDYSSVMLTSEEEIKTTNPVATEQYGVVADNLQQQNAAPIVGAVNSQGALPGMVWQNRDVYLQGPIWAKIPHTDGNFHPSPLMGGFGLKHPPPQILIKNTPVPADPPTTFSQAKLASFITQYSTGQVSVEIEWELQKENSKRWNPEIQYTSNYCKSTNVDFAVNTDGTYSEPRPIGTRYLTRNL

SEQ ID NO: 397 - protein, 736 aa, synthetic construct
MAADGYLPDWLEDNLSEGIREWWALQPGAPKPKANQQHQDNARGLVLPGYKYLGPGNGLDKGEPVNAADAAALEHDKAYDQQLKAGDNPYLKYNHADAEFQERLKEDTSFGGNLGRAVFQAKKRLLEPLGLVEEAAKTAPGKKRPVDQSPQEPDSSSGVGKSGKQPARKRLNFGQTGDSESVPDPQPLGEPPAAPTSLGSNTMASGGGAPMADNNEGADGVGNSSGNWHCDSQWLGDRVITTSTRTWALPTYNNHLYKQISSQSGASNDNHYFGYSTPWGYFDFNRFHCHFSPRDWQRLINNNWGFRPKKLSFKLFNIQVKEVTQNDGTTTIANNLTSTVQVFTDSEYQLPYVLGSAHQGCLPPFPADVFMVPQYGYLTLNNGSQAVGRSSFYCLEYFPSQMLRTGNNFQFSYTFEDVPFHSSYAHSQSLDRLMNPLIDQYLYYLNRTQGTTSGTTNQSRLLFSQAGPQSMSLQARNWLPGPCYRQQRLSKTANDNNNSNIPWTAASKYHLNGRDSLVNPGPAMASHKDDEEKFFPMHGNLIFGKEGTTASNAELDNVMITDEEEIRTTNPVATEQYGTVANNLQSSNTAPTTRTVNDQGALPGMVWQDRDVYLQGPIWAKIPHTDGHFHPSPLMGGFGLKHPPPQIMIKNTPVPANPPTTFSPAKFASFITQYSTGQVSVEIEWELQKENSKRWNPEIQYTSNYNKSVNVDFTVDTNGVYSEPRPIGTRYLTRPL

SEQ ID NO: 398 - protein, 736 aa, synthetic construct
MAADGYLPDWLEDNLSEGIREWWALQPGAPKPKANQQHQDNARGLVLPGYKYLGPGNGLDKGEPVNAADAAALEHDKAYDQQLKAGDNPYLKYNHADAEFQERLKEDTSFGGNLGRAVFQAKKRLLEPLGLVEEAAKTAPGKKRPVDQSPQEPDSSSGVGKSGKQPARKRLNFGQTGDSESVPDPQPLGEPPAAPTSLGSNTMASGGGAPMADNNEGADGVGNSSGNWHCDSQWLGDRVITTSTRTWALPTYNNHLYKQISSQSGASNDNHYFGYSTPWGYFDFNRFHCHFSPRDWQRLINNNWGFRPKKLSFKLFNIQVKEVTQNDGTTTIANNLTSTVQVFTDSEYQLPYVLGSAHQGCLPPFPADVFMVPQYGYLTLNNGSQAVGRSSFYCLEYFPSQMLRTGNNFQFSYTFEDVPFHSSYAHSQSLDRLMNPLIDQYLYYLNRTQGTTSGTTNQSRLLFSQAGPQSMSLQARNWLPGPCYRQQRLSKTANDNNNSNFPWTRASKYHLNGRDSLVNPGPAMASHKDDEEKFFPMHGNLIFGKEGTTASNAELDNVMITDEEEIRTTNPVATEQYGTVANNLQSSNTAPTTRTVNDQGALPGMVWQDRDVYLQGPIWAKIPHTDGHFHPSPLMGGFGLKHPPPQIMIKNTPVPANPPTTFSPAKFASFITQYSTGQVSVEIEWELQKENSKRWNPEIQYTSNYNKSVNVDFTVDTNGVYSEPRPIGTRYLTRPL

SEQ ID NO: 399 - protein, 736 aa, synthetic construct
MAADGYLPDWLEDNLSEGIREWWALQPGAPKPKANQQHQDNARGLVLPGYKYLGPGNGLDKGEPVNAADAAALEHDKAYDQQLKAGDNPYLKYNHADAEFQERLKEDTSFGGNLGRAVFQAKKRLLEPLGLVEEAAKTAPGKKRPVDQSPQEPDSSSGVGKSGKQPARKRLNFGQTGDSESVPDPQPLGEPPAAPTSLGSNTMASGGGAPMADNNEGADGVGNSSGNWHCDSQWLGDRVITTSTRTWALPTYNNHLYKQISSQSGASNDNHYFGYSTPWGYFDFNRFHCHFSPRDWQRLINNNWGFRPKKLSFKLFNIQVKEVTQNDGTTTIANNLTSTVQVFTDSEYQLPYVLGSAHQGCLPPFPADVFMVPQYGYLTLNNGSQAVGRSSFYCLEYFPSQMLRTGNNFQFSYTFEDVPFHSSYAHSQSLDRLMNPLIDQYLYYLNRTQGTTSGTTNQSRLLFSQAGPQSMSLQARNWLPGPCYRQQRLSKTANDNNNSNFPWTAASKYHLNGRDSLVNPGPAMASHKDDEEKFFPMHGNLIFGKEGTTASNAELDNVMITDEEEIRTTNPVATEQYGTVANNLQSSNTAPTTRTVNDQGALPGMVWQDRDVYLQGPIWAKIPHTDGHFHPSPLMGGFGLKHPPPQIMIKNTPVPANPPTTFSPAKFASFITQYSTGQVSVEIEWELQKENSKRWNPEIQYTSNYCKSVNVDFTVDTNGVYSEPRPIGTRYLTRPL

SEQ ID NO: 400 - protein, 736 aa, synthetic construct
MAADGYLPDWLEDNLSEGIREWWALQPGAPKPKANQQHQDNARGLVLPGYKYLGPGNGLDKGEPVNAADAAALEHDKAYDQQLKAGDNPYLKYNHADAEFQERLKEDTSFGGNLGRAVFQAKKRLLEPLGLVEEAAKTAPGKKRPVDQSPQEPDSSSGVGKSGKQPARKRLNFGQTGDSESVPDPQPLGEPPAAPTSLGSNTMASGGGAPMADNNEGADGVGNSSGNWHCDSQWLGDRVITTSTRTWALPTYNNHLYKQISSQSGASNDNHYFGYSTPWGYFDFNRFHCHFSPRDWQRLINNNWGFRPKKLSFKLFNIQVKEVTQNDGTTTIANNLTSTVQVFTDSEYQLPYVLGSAHQGCLPPFPADVFMVPQYGYLTLNNGSQAVGRSSFYCLEYFPSQMLRTGNNFQFSYTFEDVPFHSSYAHSQSLDRLMNPLIDQYLYYLNRTQGTTSGTTNQSRLLFSQAGPQSMSLQARNWLPGPCYRQQRLSKTANDNNNSNIPWTRASKYHLNGRDSLVNPGPAMASHKDDEEKFFPMHGNLIFGKEGTTASNAELDNVMITDEEEIRTTNPVATEQYGTVANNLQSSNTAPTTRTVNDQGALPGMVWQDRDVYLQGPIWAKIPHTDGHFHPSPLMGGFGLKHPPPQIMIKNTPVPANPPTTFSPAKFASFITQYSTGQVSVEIEWELQKENSKRWNPEIQYTSNYNKSVNVDFTVDTNGVYSEPRPIGTRYLTRPL

SEQ ID NO: 401 - protein, 736 aa, synthetic construct
MAADGYLPDWLEDNLSEGIREWWALQPGAPKPKANQQHQDNARGLVLPGYKYLGPGNGLDKGEPVNAADAAALEHDKAYDQQLKAGDNPYLKYNHADAEFQERLKEDTSFGGNLGRAVFQAKKRLLEPLGLVEEAAKTAPGKKRPVDQSPQEPDSSSGVGKSGKQPARKRLNFGQTGDSESVPDPQPLGEPPAAPTSLGSNTMASGGGAPMADNNEGADGVGNSSGNWHCDSQWLGDRVITTSTRTWALPTYNNHLYKQISSQSGASNDNHYFGYSTPWGYFDFNRFHCHFSPRDWQRLINNNWGFRPKKLSFKLFNIQVKEVTQNDGTTTIANNLTSTVQVFTDSEYQLPYVLGSAHQGCLPPFPADVFMVPQYGYLTLNNGSQAVGRSSFYCLEYFPSQMLRTGNNFQFSYTFEDVPFHSSYAHSQSLDRLMNPLIDQYLYYLNRTQGTTSGTTNQSRLLFSQAGPQSMSLQARNWLPGPCYRQQRLSKTANDNNNSNIPWTAASKYHLNGRDSLVNPGPAMASHKDDEEKFFPMHGNLIFGKEGTTASNAELDNVMITDEEEIRTTNPVATEQYGTVANNLQSSNTAPTTRTVNDQGALPGMVWQDRDVYLQGPIWAKIPHTDGHFHPSPLMGGFGLKHPPPQIMIKNTPVPANPPTTFSPAKFASFITQYSTGQVSVEIEWELQKENSKRWNPEIQYTSNYCKSVNVDFTVDTNGVYSEPRPIGTRYLTRPL

SEQ ID NO: 402 - protein, 736 aa, synthetic construct
MAADGYLPDWLEDNLSEGIREWWALQPGAPKPKANQQHQDNARGLVLPGYKYLGPGNGLDKGEPVNAADAAALEHDKAYDQQLKAGDNPYLKYNHADAEFQERLKEDTSFGGNLGRAVFQAKKRLLEPLGLVEEAAKTAPGKKRPVDQSPQEPDSSSGVGKSGKQPARKRLNFGQTGDSESVPDPQPLGEPPAAPTSLGSNTMASGGGAPMADNNEGADGVGNSSGNWHCDSQWLGDRVITTSTRTWALPTYNNHLYKQISSQSGASNDNHYFGYSTPWGYFDFNRFHCHFSPRDWQRLINNNWGFRPKKLSFKLFNIQVKEVTQNDGTTTIANNLTSTVQVFTDSEYQLPYVLGSAHQGCLPPFPADVFMVPQYGYLTLNNGSQAVGRSSFYCLEYFPSQMLRTGNNFQFSYTFEDVPFHSSYAHSQSLDRLMNPLIDQYLYYLNRTQGTTSGTTNQSRLLFSQAGPQSMSLQARNWLPGPCYRQQRLSKTANDNNNSNFPWTRASKYHLNGRDSLVNPGPAMASHKDDEEKFFPMHGNLIFGKEGTTASNAELDNVMITDEEEIRTTNPVATEQYGTVANNLQSSNTAPTTRTVNDQGALPGMVWQDRDVYLQGPIWAKIPHTDGHFHPSPLMGGFGLKHPPPQIMIKNTPVPANPPTTFSPAKFASFITQYSTGQVSVEIEWELQKENSKRWNPEIQYTSNYCKSVNVDFTVDTNGVYSEPRPIGTRYLTRPL

SEQ ID NO: 403 - protein, 736 aa, synthetic construct
MAADGYLPDWLEDNLSEGIREWWALQPGAPKPKANQQHQDNARGLVLPGYKYLGPGNGLDKGEPVNAADAAALEHDKAYDQQLKAGDNPYLKYNHADAEFQERLKEDTSFGGNLGRAVFQAKKRLLEPLGLVEEAAKTAPGKKRPVDQSPQEPDSSSGVGKSGKQPARKRLNFGQTGDSESVPDPQPLGEPPAAPTSLGSNTMASGGGAPMADNNEGADGVGNSSGNWHCDSQWLGDRVITTSTRTWALPTYNNHLYKQISSQSGASNDNHYFGYSTPWGYFDFNRFHCHFSPRDWQRLINNNWGFRPKKLSFKLFNIQVKEVTQNDGTTTIANNLTSTVQVFTDSEYQLPYVLGSAHQGCLPPFPADVFMVPQYGYLTLNNGSQAVGRSSFYCLEYFPSQMLRTGNNFQFSYTFEDVPFHSSYAHSQSLDRLMNPLIDQYLYYLNRTQGTTSGTTNQSRLLFSQAGPQSMSLQARNWLPGPCYRQQRLSKTANDNNNSNIPWTRASKYHLNGRDSLVNPGPAMASHKDDEEKFFPMHGNLIFGKEGTTASNAELDNVMITDEEEIRTTNPVATEQYGTVANNLQSSNTAPTTRTVNDQGALPGMVWQDRDVYLQGPIWAKIPHTDGHFHPSPLMGGFGLKHPPPQIMIKNTPVPANPPTTFSPAKFASFITQYSTGQVSVEIEWELQKENSKRWNPEIQYTSNYCKSVNVDFTVDTNGVYSEPRPIGTRYLTRPL

SEQ ID NO: 404 - protein, 736 aa, synthetic construct
MAADGYLPDWLEDNLSEGIREWWALQPGAPKPKANQQHQDNARGLVLPGYKYLGPGNGLDKGEPVNAADAAALEHDKAYDQQLKAGDNPYLKYNHADAEFQERLKEDTSFGGNLGRAVFQAKKRLLEPLGLVEEAAKTAPGKKRPVDQSPQEPDSSSGVGKSGKQPARKRLNFGQTGDSESVPDPQPLGEPPAAPTSLGSNTMASGGGAPMADNNEGADGVGNSSGNWHCDSQWLGDRVITTSTRTWALPTYNNHLYKQISSQSGASNDNHYFGYSTPWGYFDFNRFHCHFSPRDWQRLINNNWGFRPKKLSFKLFNIQVKEVTQNDGTTTIANNLTSTVQVFADSEYQLPYVLGSAHQGCLPPFPADVFMVPQYGYLTLNNGSQAVGRSSFYCLEYFPSQMLRTGNNFQFSYTFEDVPFHSSYAHSQSLDRLMNPLIDQYLYYLNRTQGTTSGTTNQSRLLFSQAGPQSMSLQARNWLPGPCYRQQRLSKTANDNNNSNFPWTAASKYHLNGRDSLVNPGPAMASHKDDEEKFFPMHGNLIFGKEGTTASNAELDNVMITDEEEIRTTNPVATEQYGTVANNLQSSNTAPTTRTVNDQGALPGMVWQDRDVYLQGPIWAKIPHTDGHFHPSPLMGGFGLKHPPPQIMIKNTPVPANPPTTFSPAKFASFITQYSTGQVSVEIEWELQKENSKRWNPEIQYTSNYNKSVNVDFTVDTNGVYSEPRPIGTRYLTRPL

SEQ ID NO: 405 - protein, 736 aa, synthetic construct
MAADGYLPDWLEDNLSEGIREWWALQPGAPKPKANQQHQDNARGLVLPGYKYLGPGNGLDKGEPVNAADAAALEHDKAYDQQLKAGDNPYLKYNHADAEFQERLKEDTSFGGNLGRAVFQAKKRLLEPLGLVEEAAKTAPGKKRPVDQSPQEPDSSSGVGKSGKQPARKRLNFGQTGDSESVPDPQPLGEPPAAPTSLGSNTMASGGGAPMADNNEGADGVGNSSGNWHCDSQWLGDRVITTSTRTWALPTYNNHLYKQISSQSGASNDNHYFGYSTPWGYFDFNRFHCHFSPRDWQRLINNNWGFRPKKLSFKLFNIQVKEVTQNDGTTTIANNLTSTVQVFADSEYQLPYVLGSAHQGCLPPFPADVFMVPQYGYLTLNNGSQAVGRSSFYCLEYFPSQMLRTGNNFQFSYTFEDVPFHSSYAHSQSLDRLMNPLIDQYLYYLNRTQGTTSGTTNQSRLLFSQAGPQSMSLQARNWLPGPCYRQQRLSKTANDNNNSNIPWTAASKYHLNGRDSLVNPGPAMASHKDDEEKFFPMHGNLIFGKEGTTASNAELDNVMITDEEEIRTTNPVATEQYGTVANNLQSSNTAPTTRTVNDQGALPGMVWQDRDVYLQGPIWAKIPHTDGHFHPSPLMGGFGLKHPPPQIMIKNTPVPANPPTTFSPAKFASFITQYSTGQVSVEIEWELQKENSKRWNPEIQYTSNYNKSVNVDFTVDTNGVYSEPRPIGTRYLTRPL

SEQ ID NO: 406 - protein, 736 aa, synthetic construct
MAADGYLPDWLEDNLSEGIREWWALQPGAPKPKANQQHQDNARGLVLPGYKYLGPGNGLDKGEPVNAADAAALEHDKAYDQQLKAGDNPYLKYNHADAEFQERLKEDTSFGGNLGRAVFQAKKRLLEPLGLVEEAAKTAPGKKRPVDQSPQEPDSSSGVGKSGKQPARKRLNFGQTGDSESVPDPQPLGEPPAAPTSLGSNTMASGGGAPMADNNEGADGVGNSSGNWHCDSQWLGDRVITTSTRTWALPTYNNHLYKQISSQSGASNDNHYFGYSTPWGYFDFNRFHCHFSPRDWQRLINNNWGFRPKKLSFKLFNIQVKEVTQNDGTTTIANNLTSTVQVFADSEYQLPYVLGSAHQGCLPPFPADVFMVPQYGYLTLNNGSQAVGRSSFYCLEYFPSQMLRTGNNFQFSYTFEDVPFHSSYAHSQSLDRLMNPLIDQYLYYLNRTQGTTSGTTNQSRLLFSQAGPQSMSLQARNWLPGPCYRQQRLSKTANDNNNSNFPWTRASKYHLNGRDSLVNPGPAMASHKDDEEKFFPMHGNLIFGKEGTTASNAELDNVMITDEEEIRTTNPVATEQYGTVANNLQSSNTAPTTRTVNDQGALPGMVWQDRDVYLQGPIWAKIPHTDGHFHPSPLMGGFGLKHPPPQIMIKNTPVPANPPTTFSPAKFASFITQYSTGQVSVEIEWELQKENSKRWNPEIQYTSNYNKSVNVDFTVDTNGVYSEPRPIGTRYLTRPL

SEQ ID NO: 407 - protein, 736 aa, synthetic construct
MAADGYLPDWLEDNLSEGIREWWALQPGAPKPKANQQHQDNARGLVLPGYKYLGPGNGLDKGEPVNAADAAALEHDKAYDQQLKAGDNPYLKYNHADAEFQERLKEDTSFGGNLGRAVFQAKKRLLEPLGLVEEAAKTAPGKKRPVDQSPQEPDSSSGVGKSGKQPARKRLNFGQTGDSESVPDPQPLGEPPAAPTSLGSNTMASGGGAPMADNNEGADGVGNSSGNWHCDSQWLGDRVITTSTRTWALPTYNNHLYKQISSQSGASNDNHYFGYSTPWGYFDFNRFHCHFSPRDWQRLINNNWGFRPKKLSFKLFNIQVKEVTQNDGTTTIANNLTSTVQVFADSEYQLPYVLGSAHQGCLPPFPADVFMVPQYGYLTLNNGSQAVGRSSFYCLEYFPSQMLRTGNNFQFSYTFEDVPFHSSYAHSQSLDRLMNPLIDQYLYYLNRTQGTTSGTTNQSRLLFSQAGPQSMSLQARNWLPGPCYRQQRLSKTANDNNNSNFPWTAASKYHLNGRDSLVNPGPAMASHKDDEEKFFPMHGNLIFGKEGTTASNAELDNVMITDEEEIRTTNPVATEQYGTVANNLQSSNTAPTTRTVNDQGALPGMVWQDRDVYLQGPIWAKIPHTDGHFHPSPLMGGFGLKHPPPQIMIKNTPVPANPPTTFSPAKFASFITQYSTGQVSVEIEWELQKENSKRWNPEIQYTSNYCKSVNVDFTVDTNGVYSEPRPIGTRYLTRPL

SEQ ID NO: 408 - protein, 736 aa, synthetic construct
MAADGYLPDWLEDNLSEGIREWWALQPGAPKPKANQQHQDNARGLVLPGYKYLGPGNGLDKGEPVNAADAAALEHDKAYDQQLKAGDNPYLKYNHADAEFQERLKEDTSFGGNLGRAVFQAKKRLLEPLGLVEEAAKTAPGKKRPVDQSPQEPDSSSGVGKSGKQPARKRLNFGQTGDSESVPDPQPLGEPPAAPTSLGSNTMASGGGAPMADNNEGADGVGNSSGNWHCDSQWLGDRVITTSTRTWALPTYNNHLYKQISSQSGASNDNHYFGYSTPWGYFDFNRFHCHFSPRDWQRLINNNWGFRPKKLSFKLFNIQVKEVTQNDGTTTIANNLTSTVQVFADSEYQLPYVLGSAHQGCLPPFPADVFMVPQYGYLTLNNGSQAVGRSSFYCLEYFPSQMLRTGNNFQFSYTFEDVPFHSSYAHSQSLDRLMNPLIDQYLYYLNRTQGTTSGTTNQSRLLFSQAGPQSMSLQARNWLPGPCYRQQRLSKTANDNNNSNIPWTRASKYHLNGRDSLVNPGPAMASHKDDEEKFFPMHGNLIFGKEGTTASNAELDNVMITDEEEIRTTNPVATEQYGTVANNLQSSNTAPTTRTVNDQGALPGMVWQDRDVYLQGPIWAKIPHTDGHFHPSPLMGGFGLKHPPPQIMIKNTPVPANPPTTFSPAKFASFITQYSTGQVSVEIEWELQKENSKRWNPEIQYTSNYNKSVNVDFTVDTNGVYSEPRPIGTRYLTRPL

SEQ ID NO: 409 - protein, 736 aa, synthetic construct
MAADGYLPDWLEDNLSEGIREWWALQPGAPKPKANQQHQDNARGLVLPGYKYLGPGNGLDKGEPVNAADAAALEHDKAYDQQLKAGDNPYLKYNHADAEFQERLKEDTSFGGNLGRAVFQAKKRLLEPLGLVEEAAKTAPGKKRPVDQSPQEPDSSSGVGKSGKQPARKRLNFGQTGDSESVPDPQPLGEPPAAPTSLGSNTMASGGGAPMADNNEGADGVGNSSGNWHCDSQWLGDRVITTSTRTWALPTYNNHLYKQISSQSGASNDNHYFGYSTPWGYFDFNRFHCHFSPRDWQRLINNNWGFRPKKLSFKLFNIQVKEVTQNDGTTTIANNLTSTVQVFADSEYQLPYVLGSAHQGCLPPFPADVFMVPQYGYLTLNNGSQAVGRSSFYCLEYFPSQMLRTGNNFQFSYTFEDVPFHSSYAHSQSLDRLMNPLIDQYLYYLNRTQGTTSGTTNQSRLLFSQAGPQSMSLQARNWLPGPCYRQQRLSKTANDNNNSNIPWTAASKYHLNGRDSLVNPGPAMASHKDDEEKFFPMHGNLIFGKEGTTASNAELDNVMITDEEEIRTTNPVATEQYGTVANNLQSSNTAPTTRTVNDQGALPGMVWQDRDVYLQGPIWAKIPHTDGHFHPSPLMGGFGLKHPPPQIMIKNTPVPANPPTTFSPAKFASFITQYSTGQVSVEIEWELQKENSKRWNPEIQYTSNYCKSVNVDFTVDTNGVYSEPRPIGTRYLTRPL

SEQ ID NO: 410 - protein, 736 aa, synthetic construct
MAADGYLPDWLEDNLSEGIREWWALQPGAPKPKANQQHQDNARGLVLPGYKYLGPGNGLDKGEPVNAADAAALEHDKAYDQQLKAGDNPYLKYNHADAEFQERLKEDTSFGGNLGRAVFQAKKRLLEPLGLVEEAAKTAPGKKRPVDQSPQEPDSSSGVGKSGKQPARKRLNFGQTGDSESVPDPQPLGEPPAAPTSLGSNTMASGGGAPMADNNEGADGVGNSSGNWHCDSQWLGDRVITTSTRTWALPTYNNHLYKQISSQSGASNDNHYFGYSTPWGYFDFNRFHCHFSPRDWQRLINNNWGFRPKKLSFKLFNIQVKEVTQNDGTTTIANNLTSTVQVFADSEYQLPYVLGSAHQGCLPPFPADVFMVPQYGYLTLNNGSQAVGRSSFYCLEYFPSQMLRTGNNFQFSYTFEDVPFHSSYAHSQSLDRLMNPLIDQYLYYLNRTQGTTSGTTNQSRLLFSQAGPQSMSLQARNWLPGPCYRQQRLSKTANDNNNSNFPWTRASKYHLNGRDSLVNPGPAMASHKDDEEKFFPMHGNLIFGKEGTTASNAELDNVMITDEEEIRTTNPVATEQYGTVANNLQSSNTAPTTRTVNDQGALPGMVWQDRDVYLQGPIWAKIPHTDGHFHPSPLMGGFGLKHPPPQIMIKNTPVPANPPTTFSPAKFASFITQYSTGQVSVEIEWELQKENSKRWNPEIQYTSNYCKSVNVDFTVDTNGVYSEPRPIGTRYLTRPL

SEQ ID NO: 411 - protein, 736 aa, synthetic construct
MAADGYLPDWLEDNLSEGIREWWALQPGAPKPKANQQHQDNARGLVLPGYKYLGPGNGLDKGEPVNAADAAALEHDKAYDQQLKAGDNPYLKYNHADAEFQERLKEDTSFGGNLGRAVFQAKKRLLEPLGLVEEAAKTAPGKKRPVDQSPQEPDSSSGVGKSGKQPARKRLNFGQTGDSESVPDPQPLGEPPAAPTSLGSNTMASGGGAPMADNNEGADGVGNSSGNWHCDSQWLGDRVITTSTRTWALPTYNNHLYKQISSQSGASNDNHYFGYSTPWGYFDFNRFHCHFSPRDWQRLINNNWGFRPKKLSFKLFNIQVKEVTQNDGTTTIANNLTSTVQVFADSEYQLPYVLGSAHQGCLPPFPADVFMVPQYGYLTLNNGSQAVGRSSFYCLEYFPSQMLRTGNNFQFSYTFEDVPFHSSYAHSQSLDRLMNPLIDQYLYYLNRTQGTTSGTTNQSRLLFSQAGPQSMSLQARNWLPGPCYRQQRLSKTANDNNNSNIPWTRASKYHLNGRDSLVNPGPAMASHKDDEEKFFPMHGNLIFGKEGTTASNAELDNVMITDEEEIRTTNPVATEQYGTVANNLQSSNTAPTTRTVNDQGALPGMVWQDRDVYLQGPIWAKIPHTDGHFHPSPLMGGFGLKHPPPQIMIKNTPVPANPPTTFSPAKFASFITQYSTGQVSVEIEWELQKENSKRWNPEIQYTSNYCKSVNVDFTVDTNGVYSEPRPIGTRYLTRPL

SEQ ID NO: 412 - DNA, 365 bp, synthetic construct
  source 1..365: mol_type = other DNA
ctagttattaatagtaatcaattacggggtcattagttcatagcccatatatggagttccgcgttacataacttacggtaaatggcccgcctggctgaccgcccaacgacccccgcccattgacgtcaataatgacgtatgttcccatagtaacgccaatagggactttccattgacgtcaatgggtggagtatttacggtaaactgcccacttggcagtacatcaagtgtatcatatgccaagtccgccccctattgacgtcaatgacggtaaatggcccgcctggcattatgcccagtacatgaccttacgggactttcctacttggcagtacatctacgtattagtcatcgctattaccatg

SEQ ID NO: 413 - DNA, 380 bp, synthetic construct
  source 1..380: mol_type = other DNA
ggcattgattattgactagttattaatagtaatcaattacggggtcattagttcatagcccatatatggagttccgcgttacataacttacggtaaatggcccgcctggctgaccgcccaacgacccccgcccattgacgtcaataatgacgtatgttcccatagtaacgccaatagggactttccattgacgtcaatgggtggagtatttacggtaaactgcccacttggcagtacatcaagtgtatcatatgccaagtccgccccctattgacgtcaatgacggtaaatggcccgcctggcattatgcccagtacatgaccttacgggactttcctacttggcagtacatctacgtattagtcatcgctattaccatg

SEQ ID NO: 414 - DNA, 479 bp, synthetic construct
  source 1..479: mol_type = other DNA
tcgaggtgagccccacgttctgcttcactctccccatctcccccccctccccacccccaattttgtatttatttattttttaattattttgtgcagcgatgggggcggggggggggggggggcgcgcgccaggcggggcggggcggggcgaggggcggggcggggcgaggcggagaggtgcggcggcagccaatcagagcggcgcgctccgaaagtttccttttatggcgaggcggcggcggcggcggccctataaaaagcgaagcgcgcggcgggcgggagtcgctgcgcgctgccttcgccccgtgccccgctccgccgccgcctcgcgccgcccgccccggctctgactgaccgcgttactcccacaggtgagcgggcgggacggcccttctcctccgggctgtaattagcgcttggtttaatgacggcttgtttcttttctgtggctgcgtgaaagccttgaggggctccgggag

SEQ ID NO: 415 - DNA, 1246 bp, synthetic construct
  source 1..1246: mol_type = other DNA
tcgaggtgagccccacgttctgcttcactctccccatctcccccccctccccacccccaattttgtatttatttattttttaattattttgtgcagcgatgggggcggggggggggggggggcgcgcgccaggcggggcggggcggggcgaggggcggggcggggcgaggcggagaggtgcggcggcagccaatcagagcggcgcgctccgaaagtttccttttatggcgaggcggcggcggcggcggccctataaaaagcgaagcgcgcggcgggcgggagtcgctgcgcgctgccttcgccccgtgccccgctccgccgccgcctcgcgccgcccgccccggctctgactgaccgcgttactcccacaggtgagcgggcgggacggcccttctcctccgggctgtaattagcgcttggtttaatgacggcttgtttcttttctgtggctgcgtgaaagccttgaggggctccgggagggccctttgtgcggggggagcggctcggggggtgcgtgcgtgtgtgtgtgcgtggggagcgccgcgtgcggctccgcgctgcccggcggctgtgagcgctgcgggcgcggcgcggggctttgtgcgctccgcagtgtgcgcgaggggagcgcggccgggggcggtgccccgcggtgcggggggggctgcgaggggaacaaaggctgcgtgcggggtgtgtgcgtgggggggtgagcagggggtgtgggcgcgtcggtcgggctgcaaccccccctgcacccccctccccgagttgctgagcacggcccggcttcgggtgcggggctccgtacggggcgtggcgcggggctcgccgtgccgggcggggggtggcggcaggtgggggtgccgggcggggcggggccgcctcgggccggggagggctcgggggaggggcgcggcggcccccggagcgccggcggctgtcgaggcgcggcgagccgcagccattgccttttatggtaatcgtgcgagagggcgcagggacttcctttgtcccaaatctgtgcggagccgaaatctgggaggcgccgccgcaccccctctagcgggcgcggggcgaagcggtgcggcgccggcaggaaggaaatgggcggggagggccttcgtgcgtcgccgcgccgccgtccccttctccctctccagcctcggggctgtccgcggggggacggctgccttcgggggggacggggcagggcggggttcggcttctggcgtgtgaccggcgg

SEQ ID NO: 416 - DNA, 953 bp, synthetic construct
  source 1..953: mol_type = other DNA
aattcggtaccctagttattaatagtaatcaattacggggtcattagttcatagcccatatatggagttccgcgttacataacttacggtaaatggcccgcctggctgaccgcccaacgacccccgcccattgacgtcaataatgacgtatgttcccatagtaacgccaatagggactttccattgacgtcaatgggtggactatttacggtaaactgcccacttggcagtacatcaagtgtatcatatgccaagtacgccccctattgacgtcaatgacggtaaatggcccgcctggcattatgcccagtacatgaccttatgggactttcctacttggcagtacatctacgtattagtcatcgctattaccatggtcgaggtgagccccacgttctgcttcactctccccatctcccccccctccccacccccaattttgtatttatttattttttaattattttgtgcagcgatgggggcggggggggggggggggcgcgcgccaggcggggcggggcggggcgaggggcggggcggggcgaggcggagaggtgcggcggcagccaatcagagcggcgcgctccgaaagtttccttttatggcgaggcggcggcggcggcggccctataaaaagcgaagcgcgcggcgggcgggagtcgctgcgacgctgccttcgccccgtgccccgctccgccgccgcctcgcgccgcccgccccggctctgactgaccgcgttactcccacaggtgagcgggcgggacggcccttctcctccgggctgtaattagcgcttggtttaatgacggcttgtttcttttctgtggctgcgtgaaagccttgaggggctccgggagctagagcctctgctaaccatgttcatgccttcttctttttcctacagctcctgggcaacgtgctggttattgtgctgtctcatcattttggcaaag

SEQ ID NO: 417 - DNA, 1168 bp, synthetic construct
  source 1..1168: mol_type = other DNA
cgtgaggctccggtgcccgtcagtgggcagagcgcacatcgcccacagtccccgagaagttggggggaggggtcggcaattgaaccggtgcctagagaaggtggcgcggggtaaactgggaaagtgatgtcgtgtactggctccgcctttttcccgagggtgggggagaaccgtatataagtgcagtagtcgccgtgaacgttctttttcgcaacgggtttgccgccagaacacaggtaagtgccgtgtgtggttcccgcgggcctggcctctttacgggttatggcccttgcgtgccttgaattacttccacctggctccagtacgtgattcttgatcccgagctggagccaggggcgggccttgcgctttaggagccccttcgcctcgtgcttgagttgaggcctggcctgggcgctggggccgccgcgtgcgaatctggtggcaccttcgcgcctgtctcgctgctttcgataagtctctagccatttaaaatttttgatgacctgctgcgacgctttttttctggcaagatagtcttgtaaatgcgggccaggatctgcacactggtatttcggtttttggggccgcgggcggcgacggggcccgtgcgtcccagcgcacatgttcggcgaggcggggcctgcgagcgcggccaccgagaatcggacgggggtagtctcaagctggccggcctgctctggtgcctggcctcgcgccgccgtgtatcgccccgccctgggcggcaaggctggcccggtcggcaccagttgcgtgagcggaaagatggccgcttcccggccctgctccagggggctcaaaatggaggacgcggcgctcgggagagcgggcgggtgagtcacccacacaaaggaaaggggcctttccgtcctcagccgtcgcttcatgtgactccacggagtaccgggcgccgtccaggcacctcgattagttctggagcttttggagtacgtcgtctttaggttggggggaggggttttatgcgatggagtttccccacactgagtgggtggagactgaagttaggccagcttggcacttgatgtaattctccttggaatttgccctttttgagtttggatcttggttcattctcaagcctcagacagtggttcaaagtttttttcttccatttcaggtgtcgtga

SEQ ID NO: 418 - DNA, 92 bp, synthetic construct
  source 1..92: mol_type = other DNA
aagaggtaagggtttaagggatggttggttggtggggtattaatgtttaattacctggagcacctgcctgaaatcactttttttcaggttgg

SEQ ID NO: 419 - DNA, 79 bp, synthetic construct
  source 1..79: mol_type = other DNA
aagaggtaagggtttaagggatggttggttggtggggtattaatgtttaattacctggagcacctgcctgaaatcactt

SEQ ID NO: 420 - DNA, 95 bp, synthetic construct
  source 1..95: mol_type = other DNA
cctctgctaaccatgttcatgccttcttctttttcctacagctcctgggcaacgtgctggttattgtgctgtctcatcattttggcaaagaattc

SEQ ID NO: 421 - DNA, 90 bp, synthetic construct
  source 1..90: mol_type = other DNA
cctctgctaaccatgttcatgccttcttctttttcctacagctcctgggcaacgtgctggttattgtgctgtctcatcattttggcaaag

SEQ ID NO: 422 - DNA, 918 bp, synthetic construct
  source 1..918: mol_type = other DNA
ggcatcctaaaaaatattcagtggaaacgtaaaaacattaaagactgattaaacatcgcagcatgacacagatttagcaactgagcataaataatttgactcggatactgctccaaaatccgaagaggaccaatttcttccaggaggacaactacctcgtcctctgcagacccctctcctcggcagctgaaggagtgtggccaatctgcctccacctccccgcggaccccctactctcaggacctcctgcagcaccccaaactggaagtggccgctgcagacccaaggacgaggggcacgcgggagccggcagccctagtggagcggttggagatgttgaggtgggagggtcacccaggtggggtgaggctggggtaggtagcggagtgaacggcttccgaagctctgggccgcccccaggttggactaagcaggcgctctgtcttcgcccccgcccagggtgggcgtctcctgaggactccccgccacacctgacccgagaccgcgcgcccagcctagaacgcttccccgacccagcgtagggccgccgcgactggcgggcgagggtcggcgggaggcctggcgaacccgggggcgggaccaggcgggcaaggcccggctgccgcagcgccgctctgcgcgaggcggctccgccgcggcggagggatacggcgcaccatatatatatcgcggggcgcagactcgcgctccggcagtggtgctgggagtgtcgtggacgccgtgccgttactcgtagtcaggcggcggcgcaggcggcggcggcggcatagcgcacagcgcgccttagcagcagcagcagcagcagcggcatcggaggtacccccgccgtcgcagcccccgcgctggtgcagccaccctcgctccctctgctcttcctcccttcgctcgcaccaagag

SEQ ID NO: 423 - DNA, 192 bp, synthetic construct
  source 1..192: mol_type = other DNA
ccctaaaatgggcaaacattgcaagcagcaaacagcaaacacacagccctccctgcctgctgaccttggagctggggcagaggtcagagacctctctgggcccatgccacctccaacatccactcgaccccttggaatttcggtggagaggagcagaggttgtcctggcgtggtttaggtagtgtgagaggg

SEQ ID NO: 424 - DNA, 205 bp, synthetic construct
  source 1..205: mol_type = other DNA
aatgactcctttcggtaagtgcagtggaagctgtacactgcccaggcaaagcgtccgggcagcgtaggcgggcgactcagatcccagccagtggacttagcccctgtttgctcctccgataactggggtgaccttggttaatattcaccagcagcctcccccgttgcccctctggatccactgcttaaatacggacgaggacagg

SEQ ID NO: 425 - DNA, 913 bp, synthetic construct
  source 1..913: mol_type = other DNA
tagggaggtcctgcacagaaggggaggagggggcagcagctgtctgaccactgttggtcttgcaacttgtgtccccaggttaatttttaaaaagcagtcaaaagtccaagtggcccttggcagcatttactctctctgtttgctctggttaataatctcaggagcacaaacattcctggaggcaggagaagaaatcaacatcctggacttatcctctgggcctctccccacccccaggattgtaactgaaatgcttcactggtgctccttttgttttaaggcattggatcttcatagctactgatcgtgcccaagcacacagtatctgcagcaaccacttaggcctccaggaatgtggtgaccattgaccctaattcattccccttcatggatcctatgtaaccatcctccaaaaagagctttcgcaaactcaaataaacacaggaaaggaagaccttcttatctttgagagtatatgtttagccctatagctctaacccactctgatctcccagggcggcagtaagtcttcagcatcaggcattttggggtgactcagtaaatggtagatcttgctaccagtggaacagccactaaggattctgcagtgagagcagagggccagctaagtggtactctcccagagactgtctgactcacgccaccccctccaccttggacacaggacgctgtggtttctgagccaggtacaatgactcctttcggtaagtgcagtggaagctgtacactgcccaggcaaagcgtccgggcagcgtaggcgggcgactcagatcccagccagtggacttagcccctgtttgctcctccgataactggggtgaccttggttaatattcaccagcagcctcccccgttgcccctctggatccactgcttaaatacggacgaggac

SEQ ID NO: 426 - DNA, 423 bp, synthetic construct
  source 1..423: mol_type = other DNA
gctctaacccactctgatctcccagggcggcagtaagtcttcagcatcaggcattttggggtgactcagtaaatggtagatcttgctaccagtggaacagccactaaggattctgcagtgagagcagagggccagctaagtggtactctcccagagactgtctgactcacgccaccccctccaccttggacacaggacgctgtggtttctgagccaggtacaatgactcctttcggtaagtgcagtggaagctgtacactgcccaggcaaagcgtccgggcagcgtaggcgggcgactcagatcccagccagtggacttagcccctgtttgctcctccgataactggggtgaccttggttaatattcaccagcagcctcccccgttgcccctctggatccactgcttaaatacggacgaggac

SEQ ID NO: 427 - DNA, 170 bp, synthetic construct
  source 1..170: mol_type = other DNA
cgatgctctaatctctctagacaaggttcatatttgtatgggttacttattctctctttgttgactaagtcaataatcagaatcagcaggtttgcagtcagattggcagggataagcagcctagctcaggagaagtgagtataaaagccccaggctgggagcagccatca

SEQ ID NO: 428 - DNA, 1873 bp, synthetic construct
  source 1..1873: mol_type = other DNA
gatcttcaatattggccattagccatattattcattggttatatagcataaatcaatattggctattggccattgcatacgttgtatctatatcataatatgtacatttatattggctcatgtccaatatgaccgccatgttggcattgattattgactagttattaatagtaatcaattacggggtcattagttcatagcccatatatggagttccgcgttacataacttacggtaaatggcccgcctggctgaccgcccaacgacccccgcccattgacgtcaataatgacgtatgttcccatagtaacgccaatagggactttccattgacgtcaatgggtggagtatttacggtaaactgcccacttggcagtacatcaagtgtatcatatgccaagtccgccccctattgacgtcaatgacggtaaatggcccgcctggcattatgcccagtacatgaccttacgggactttcctacttggcagtacatctacgtattagtcatcgctattaccatggtcgaggtgagccccacgttctgcttcactctccccatctcccccccctccccacccccaattttgtatttatttattttttaattattttgtgcagcgatgggggcggggggggggggggggcgcgcgccaggcggggcggggcggggcgaggggcggggcggggcgaggcggagaggtgcggcggcagccaatcagagcggcgcgctccgaaagtttccttttatggcgaggcggcggcggcggcggccctataaaaagcgaagcgcgcggcgggcgggagtcgctgcgacgctgccttcgccccgtgccccgctccgccgccgcctcgcgccgcccgccccggctctgactgaccgcgttactcccacaggtgagcgggcgggacggcccttctcctccgggctgtaattagcgcttggtttaatgacggcttgtttcttttctgtggctgcgtgaaagccttgaggggctccgggagggccctttgtgcgggggggagcggctcggggggtgcgtgcgtgtgtgtgtgcgtggggagcgccgcgtgcggcccgcgctgcccggcggctgtgagcgctgcgggcgcggcgcggggctttgtgcgctccgcagtgtgcgcgaggggagcgcggccgggggcggtgccccgcggtgcggggggggctgcgaggggaacaaaggctgcgtgcggggtgtgtgcgtgggggggtgagcagggggtgtgggcgcggcggtcgggctgtaacccccccctgcacccccctccccgagttgctgagcacggcccggcttcgggtgcggggctccgtacggggcgtggcgcggggctcgccgtgccgggcggggggtggcggcaggtgggggtgccgggcggggcggggccgcctcgggccggggagggctcgggggaggggcgcggcggcccccggagcgccggcggctgtcgaggcgcggcgagccgcagccattgccttttatggtaatcgtgcgagagggcgcagggacttcctttgtcccaaatctgtgcggagccgaaatctgggaggcgccgccgcaccccctctagcgggcgcggggcgaagcggtgcggcgccggcaggaaggaaatgggcggggagggccttcgtgcgtcgccgcgccgccgtccccttctccctctccagcctcggggctgtccgcggggggacggctgccttcgggggggacggggcagggcggggttcggcttctggcgtgtgaccggcggctctagagcctctgctaaccatgttcatgccttcttctttttcctacagctcctgggcaacgtgctggttattgtgctgtctcatcattttggcaaagaatt

SEQ ID NO: 429 - DNA, 1061 bp, synthetic construct
  source 1..1061: mol_type = other DNA
tagggaggtcctgcacgttacataacttacggtaaatggcccgcctggctgaccgcccaacgacccccgcccattgacgtcaataatgacgtatgttcccatagtaacgccaatagggactttccattgacgtcaatgggtggagtatttacggtaaactgcccacttggcagtacatcaagtgtatcatatgccaagtacgccccctattgacgtcaatgacggtaaatggcccgcctggcattatgcccagtacatgaccttatgggactttcctacttggcagtacatctacgtattagtcatcgctattaccatggtcgaggtgagccccacgttctgcttcactctccccatctcccccccctccccacccccaattttgtatttatttattttttaattattttgtgcagcgatgggggcgggggggggggggggcgcgcgccaggcggggcggggcggggcgaggggcggggcggggcgaggcggagaggtgcggcggcagccaatcagagcggcgcgctccgaaagtttccttttatggcgaggcggcggcggcggcggccctataaaaagcgaagcgcgcggcgggcgggagtcgctgcgcgctgccttcgccccgtgccccgctccgccgccgcctcgcgccgcccgccccggctctgactgaccgcgttactaaaacaggtaagtccggcctccgcgccgggttttggcgcctcccgcgggcgcccccctcctcacggcgagcgctgccacgtcagacgaagggcgcagcgagcgtcctgatccttccgcccggacgctcaggacagcggcccgctgctcataagactcggccttagaaccccagtatcagcagaaggacattttaggacgggacttgggtgactctagggcactggttttctttccagagagcggaacaggcgaggaaaagtagtcccttctcggcgattctgcggagggatctccgtggggcggtgaacgccgatgatgcctctactaaccatgttcatgttttctttttttttctacaggtcctgggtgacgaacag

SEQ ID NO: 430 - DNA, 398 bp, synthetic construct
  source 1..398: mol_type = other DNA
ccctaaaatgggcaaacattgcaagcagcaaacagcaaacacacagccctccctgcctgctgaccttggagctggggcagaggtcagagacctctctgggcccatgccacctccaacatccactcgaccccttggaatttcggtggagaggagcagaggttgtcctggcgtggtttaggtagtgtgagaggggaatgactcctttcggtaagtgcagtggaagctgtacactgcccaggcaaagcgtccgggcagcgtaggcgggcgactcagatcccagccagtggacttagcccctgtttgctcctccgataactggggtgaccttggttaatattcaccagcagcctcccccgttgcccctctggatccactgcttaaatacggacgaggacagg

SEQ ID NO: 431 - DNA, 592 bp, synthetic construct
  source 1..592: mol_type = other DNA
gtaaattttatggaatgtgaatcataattcaatttttcaacatgcgttaggagggacatttcaaactcttttttaccctagactttcctaccatcacccagagtatccagccaggaggggaggggctagagacaccagaagtttagcagggaggagggcgtagggattcggggaatgaagggatgggattcagactagggccaggacccagggatggagagaaagagatgagagtggtttgggggcttggtgacttagagaacagagctgcaggctcagaggcacacaggagtttctgggctcaccctgcccccttccaacccctcagttcccatcctccagcagctgtttgtgtgctgcctctgaagtccacactgaacaaacttcagcctactcatgtccctaaaatgggcaaacattgcaagcagcaaacagcaaacacacagccctccctgcctgctgaccttggagctggggcagaggtcagagacctctctgggcccatgccacctccaacatccactcgaccccttggaatttcggtggagaggagcagaggttgtcctggcgtggtttaggtagtgtgagaggg

SEQ ID NO: 432 - DNA, 72 bp, synthetic construct
  source 1..72: mol_type = other DNA
gggggaggctgctggtgaatattaaccaaggtcaccccagttatcggaggagcaaacaggggctaagtccac

SEQ ID NO: 433 - protein, 621 aa, synthetic construct
MPGFYEIVIKVPSDLDEHLPGISDSFVNWVAEKEWELPPDSDMDLNLIEQAPLTVAEKLQRDFLTEWRRVSKAPEALFFVQFEKGESYFHMHVLVETTGVKSMVLGRFLSQIREKLIQRIYRGIEPTLPNWFAVTKTRNGAGGGNKVVDECYIPNYLLPKTQPELQWAWTNMEQYLSACLNLTERKRLVAQHLTHVSQTQEQNKENQNPNSDAPVIRSKTSARYMELVGWLVDKGITSEKQWIQEDQASYISFNAASNSRSQIKAALDNAGKIMSLTKTAPDYLVGQQPVEDISSNRIYKILELNGYDPQYAASVFLGWATKKFGKRNTIWLFGPATTGKTNIAEAIAHTVPFYGCVNWTNENFPFNDCVDKMVIWWEEGKMTAKVVESAKAILGGSKVRVDQKCKSSAQIDPTPVIVTSNTNMCAVIDGNSTTFEHQQPLQDRMFKFELTRRLDHDFGKVTKQEVKDFFRWAKDHVVEVEHEFYVKKGGAKKRPAPSDADISEPKRVRESVAQPSTSDAEASINYADRYQNKCSRHVGMNLMLFPCRQCERMNQNSNICFTHGQKDCLECFPVSESQPVSVVKKAYQKLCYIHHIMGKVPDACTACDLVNVDLDDCIFEQ

SEQ ID NO: 434 - DNA, 17 bp, synthetic construct
  source 1..17: mol_type = other DNA
ctgctgcccgacaacca

SEQ ID NO: 435 - DNA, 20 bp, synthetic construct
  source 1..20: mol_type = other DNA
gaccatgtgatcgcgcttct

SEQ ID NO: 436 - DNA, 23 bp, synthetic construct
  source 1..23: mol_type = other DNA
tacctgagcacccagtccgccct

SEQ ID NO: 437 - DNA, 23 bp, synthetic construct
  source 1..23: mol_type = other DNA
tgaaggtggaggacattcctcta

SEQ ID NO: 438 - DNA, 22 bp, synthetic construct
  source 1..22: mol_type = other DNA
ctggaattgcgatttctggtaa

SEQ ID NO: 439 - DNA, 26 bp, synthetic construct
  source 1..26: mol_type = other DNA
cgagaatcaccctgccagacttccgt

SEQ ID NO: 440 - DNA, 21 bp, synthetic construct
  source 1..21: mol_type = other DNA
ccatgtacgtagccattcagg

SEQ ID NO: 441 - DNA, 19 bp, synthetic construct
  source 1..19: mol_type = other DNA
catgagggagagcgtagcc

SEQ ID NO: 442 - DNA, 24 bp, synthetic construct
  source 1..24: mol_type = other DNA
tgtccctgtatgcctctggtcgta

SEQ ID NO: 443 - DNA, 18 bp, synthetic construct
  source 1..18: mol_type = other DNA
gaaccgcatcgagctgaa

SEQ ID NO: 444 - DNA, 21 bp, synthetic construct
  source 1..21: mol_type = other DNA
tgcttgtcggccatgatatag

SEQ ID NO: 445 - DNA, 24 bp, synthetic construct
  source 1..24: mol_type = other DNA
atcgacttcaaggaggacggcaac

SEQ ID NO: 446 - DNA, 27 bp, synthetic construct
  source 1..27: mol_type = other DNA
ctcaaagtattcagcataggtgatgtc

SEQ ID NO: 447 - DNA, 21 bp, synthetic construct
  source 1..21: mol_type = other DNA
aactgcacaaggccatgaaga

SEQ ID NO: 448 - DNA, 28 bp, synthetic construct
  source 1..28: mol_type = other DNA
ttgccttcactgatgctcacattgaggt

SEQ ID NO: 449 - DNA, 19 bp, synthetic construct
  source 1..19: mol_type = other DNA
cgtgggctccagcattcta

SEQ ID NO: 450 - DNA, 22 bp, synthetic construct
  source 1..22: mol_type = other DNA
tcaccagtcatttctgcctttg

SEQ ID NO: 451 - DNA, 23 bp, synthetic construct
  source 1..23: mol_type = other DNA
ccttgagcagtgcccgaccattg

SEQ ID NO: 452 - DNA, 26 bp, synthetic construct
  source 1..26: mol_type = other DNA
cgagaatcaccctgccagacttccat

SEQ ID NO: 453 - protein, 736 aa, synthetic construct; identical to SEQ ID NO: 16

SEQ ID NO: 454 - protein, 736 aa, synthetic construct; identical to SEQ ID NO: 198

SEQ ID NO: 455 - protein, 736 aa, synthetic construct; identical to SEQ ID NO: 199

SEQ ID NO: 456 - protein, 736 aa, synthetic construct; identical to SEQ ID NO: 200

SEQ ID NO: 457 - protein, 736 aa, synthetic construct; identical to SEQ ID NO: 201

SEQ ID NO: 458 - protein, 736 aa, synthetic construct; identical to SEQ ID NO: 202

SEQ ID NO: 459 - protein, 736 aa, synthetic construct; identical to SEQ ID NO: 203

SEQ ID NO: 460 - protein, 736 aa, synthetic construct; identical to SEQ ID NO: 204

SEQ ID NO: 461 - protein, 736 aa, synthetic construct
MSRVVMSFVDHPPDWLKEAAGGLREFLDLEPGAPKPKPNQQKQDQRGLVLPGYKYLGPFNGLDKGQPVNKADEVAREHDLEYNKLLEAGDNPYLKYNHADQEFQEKLEGDTSFGGNLGRAVFQAKKRVLEPFGLAEEAPAKTAPGKKRPRPIEPPPSSENSVDEDLVERQAQRQRLGFQDGPGNSANQVQQQPAANMASAEVAAGSGGPMGDNAQGADGVGSSSGNWHCDSLWMGDRVMRFPWMGDRVITKSTRTWSLPTYNNHLYKQINSNSDVTDEKYFGYSTPWGYFDFNRFHCHFSPRDWQRLINNHWGMRPKRLNFKLFNIQVKEVTTNDGTTTIANNLTSTVQIFGDSEYQLPYVLGNAHEGCLPPFPADVFMLPQYGYLTLNDGNQVIPQSSFYCLEYFPSQMLRTGNNFSFSYEFENVPFHSMFMHNQSLDRLMNPLMDQYLWYLTATNGVQLHFKKSKKGAFASQFRNWLPGPNQRRQQWSKGAGNNNAQTNLWSYKNKYRIMNRDSVAAPGLAQAAADGFITADGQLIFSNAGQQSDEAAGAKPPTTLLITDESETRPTNPGANTKWGEVADNQQTSSTAPTMAIDNEAHIFPGMVWQDRDIYLQGPIWAKIPETDGHFHPSPLMGGFGLRNPPPQILIKNTPVPANPPETFNANKINSFITQYSTGQVTVEIEWELKKEHSKRWNPEVQYTSNFASADSLQFTVNGEGVYIEDRPIGTRYLSHNI

SEQ ID NO: 462 - protein, 736 aa, synthetic construct
MSRVVMSFVDHPPDWLKEAAGGLREFLDLEPGAPKPKPNQQKQDQRGLVLPGYKYLGPFNGLDKGQPVNKADEVAREHDLEYNKLLEAGDNPYLKYNHADQEFQEKLEGDTSFGGNLGRAVFQAKKRVLEPFGLAEEAPAKTAPGKKRPRPIEPPPSSENSVDEDLVERQAQRQRLGFQDGPGNSANQVQQQPAANMASAEVAAGSGGPMGDNAQGADGVGSSSGNWHCDSLWMGDRVMRFPWMGDRVITKSTRTWSLPTYNNHLYKQINSNSDVTDEKYFGYSTPWGYFDFNRFHCHFSPRDWQRLINNHWGMRPKRLNFKLFNIQVKEVTTNDGTTTIANNLTSTVQIFGDSEYQLPYVLGNAHEGCLPPFPADVFMLPQYGYLTLNDGNQVIPQSSFYCLEYFPSQMLRTGNNFSFSYEFENVPFHSMFMHNQSLDRLMNPLMDQYLWYLTATNGVQLHFKKSKKGAFASQFRNWLPGPNQRRQQWSKGAGNNNAQTILWSYKNKYRIMNRDSVAAPGLAQAAADGFITADGQLIFSNAGQQSDEAAGAKPPTTLLITDESETRPTNPGANTKWGEVADNQQTSSTAPTMAIDNEAHIFPGMVWQDRDIYLQGPIWAKIPETDGHFHPSPLMGGFGLRNPPPQILIKNTPVPANPPETFNANKINSFITQYSTGQVTVEIEWELKKEHSKRWNPEVQYTSNFASADSLQFTVNGEGVYIEDRPIGTRYLSHNI

SEQ ID NO: 463 - protein, 736 aa, synthetic construct
MSRVVMSFVDHPPDWLKEAAGGLREFLDLEPGAPKPKPNQQKQDQRGLVLPGYKYLGPFNGLDKGQPVNKADEVAREHDLEYNKLLEAGDNPYLKYNHADQEFQEKLEGDTSFGGNLGRAVFQAKKRVLEPFGLAEEAPAKTAPGKKRPRPIEPPPSSENSVDEDLVERQAQRQRLGFQDGPGNSANQVQQQPAANMASAEVAAGSGGPMGDNAQGADGVGSSSGNWHCDSLWMGDRVMRFPWMGDRVITKSTRTWSLPTYNNHLYKQINSNSDVTDEKYFGYSTPWGYFDFNRFHCHFSPRDWQRLINNHWGMRPKRLNFKLFNIQVKEVTTNDGTTTIANNLTSTVQIFGDSEYQLPYVLGNAHEGCLPPFPADVFMLPQYGYLTLNDGNQVIPQSSFYCLEYFPSQMLRTGNNFSFSYEFENVPFHSMFMHNQSLDRLMNPLMDQYLWYLTATNGVQLHFKKSKKGAFASQFRNWLPGPNQRRQQWSKGAGNNNAQTNLWSRKNKYRIMNRDSVAAPGLAQAAADGFITADGQLIFSNAGQQSDEAAGAKPPTTLLITDESETRPTNPGANTKWGEVADNQQTSSTAPTMAIDNEAHIFPGMVWQDRDIYLQGPIWAKIPETDGHFHPSPLMGGFGLRNPPPQILIKNTPVPANPPETFNANKINSFITQYSTGQVTVEIEWELKKEHSKRWNPEVQYTSNFASADSLQFTVNGEGVYIEDRPIGTRYLSHNI

SEQ ID NO: 464 - protein, 736 aa, synthetic construct
MSRVVMSFVDHPPDWLKEAAGGLREFLDLEPGAPKPKPNQQKQDQRGLVLPGYKYLGPFNGLDKGQPVNKADEVAREHDLEYNKLLEAGDNPYLKYNHADQEFQEKLEGDTSFGGNLGRAVFQAKKRVLEPFGLAEEAPAKTAPGKKRPRPIEPPPSSENSVDEDLVERQAQRQRLGFQDGPGNSANQVQQQPAANMASAEVAAGSGGPMGDNAQGADGVGSSSGNWHCDSLWMGDRVMRFPWMGDRVITKSTRTWSLPTYNNHLYKQINSNSDVTDEKYFGYSTPWGYFDFNRFHCHFSPRDWQRLINNHWGMRPKRLNFKLFNIQVKEVTTNDGTTTIANNLTSTVQIFGDSEYQLPYVLGNAHEGCLPPFPADVFMLPQYGYLTLNDGNQVIPQSSFYCLEYFPSQMLRTGNNFSFSYEFENVPFHSMFMHNQSLDRLMNPLMDQYLWYLTATNGVQLHFKKSKKGAFASQFRNWLPGPNQRRQQWSKGAGNNNAQTNLWSYKNKYRIMNRDSVAAPGLAQAAADGFITADGQLIFSNAGQQSDEAAGAKPPTTLLITDESETRPTNPGANTKWGEVADNQQTSSTAPTMAIDNEAHIFPGMVWQDRDIYLQGPIWAKIPETDGHFHPSPLMGGFGLRNPPPQILIKNTPVPANPPETFNANKINSFITQYSTGQVTVEIEWELKKEHSKRWNPEVQYTSNFCSADSLQFTVNGEGVYIEDRPIGTRYLSHNI

SEQ ID NO: 465 - protein, 736 aa, synthetic construct
MSRVVMSFVDHPPDWLKEAAGGLREFLDLEPGAPKPKPNQQKQDQRGLVLPGYKYLGPFNGLDKGQPVNKADEVAREHDLEYNKLLEAGDNPYLKYNHADQEFQEKLEGDTSFGGNLGRAVFQAKKRVLEPFGLAEEAPAKTAPGKKRPRPIEPPPSSENSVDEDLVERQAQRQRLGFQDGPGNSANQVQQQPAANMASAEVAAGSGGPMGDNAQGADGVGSSSGNWHCDSLWMGDRVMRFPWMGDRVITKSTRTWSLPTYNNHLYKQINSNSDVTDEKYFGYSTPWGYFDFNRFHCHFSPRDWQRLINNHWGMRPKRLNFKLFNIQVKEVTTNDGTTTIANNLTSTVQIFGDSEYQLPYVLGNAHEGCLPPFPADVFMLPQYGYLTLNDGNQVIPQSSFYCLEYFPSQMLRTGNNFSFSYEFENVPFHSMFMHNQSLDRLMNPLMDQYLWYLTATNGVQLHFKKSKKGAFASQFRNWLPGPNQRRQQWSKGAGNNNAQTILWSRKNKYRIMNRDSVAAPGLAQAAADGFITADGQLIFSNAGQQSDEAAGAKPPTTLLITDESETRPTNPGANTKWGEVADNQQTSSTAPTMAIDNEAHIFPGMVWQDRDIYLQGPIWAKIPETDGHFHPSPLMGGFGLRNPPPQILIKNTPVPANPPETFNANKINSFITQYSTGQVTVEIEWELKKEHSKRWNPEVQYTSNFASADSLQFTVNGEGVYIEDRPIGTRYLSHNI

SEQ ID NO: 466 - protein, 736 aa, synthetic construct
MSRVVMSFVDHPPDWLKEAAGGLREFLDLEPGAPKPKPNQQKQDQRGLVLPGYKYLGPFNGLDKGQPVNKADEVAREHDLEYNKLLEAGDNPYLKYNHADQEFQEKLEGDTSFGGNLGRAVFQAKKRVLEPFGLAEEAPAKTAPGKKRPRPIEPPPSSENSVDEDLVERQAQRQRLGFQDGPGNSANQVQQQPAANMASAEVAAGSGGPMGDNAQGADGVGSSSGNWHCDSLWMGDRVMRFPWMGDRVITKSTRTWSLPTYNNHLYKQINSNSDVTDEKYFGYSTPWGYFDFNRFHCHFSPRDWQRLINNHWGMRPKRLNFKLFNIQVKEVTTNDGTTTIANNLTSTVQIFGDSEYQLPYVLGNAHEGCLPPFPADVFMLPQYGYLTLNDGNQVIPQSSFYCLEYFPSQMLRTGNNFSFSYEFENVPFHSMFMHNQSLDRLMNPLMDQYLWYLTATNGVQLHFKKSKKGAFASQFRNWLPGPNQRRQQWSKGAGNNNAQTILWSYKNKYRIMNRDSVAAPGLAQAAADGFITADGQLIFSNAGQQSDEAAGAKPPTTLLITDESETRPTNPGANTKWGEVADNQQTSSTAPTMAIDNEAHIFPGMVWQDRDIYLQGPIWAKIPETDGHFHPSPLMGGFGLRNPPPQILIKNTPVPANPPETFNANKINSFITQYSTGQVTVEIEWELKKEHSKRWNPEVQYTSNFCSADSLQFTVNGEGVYIEDRPIGTRYLSHNI

SEQ ID NO: 467 - protein, 736 aa, synthetic construct
MSRVVMSFVDHPPDWLKEAAGGLREFLDLEPGAPKPKPNQQKQDQRGLVLPGYKYLGPFNGLDKGQPVNKADEVAREHDLEYNKLLEAGDNPYLKYNHADQEFQEKLEGDTSFGGNLGRAVFQAKKRVLEPFGLAEEAPAKTAPGKKRPRPIEPPPSSENSVDEDLVERQAQRQRLGFQDGPGNSANQVQQQPAANMASAEVAAGSGGPMGDNAQGADGVGSSSGNWHCDSLWMGDRVMRFPWMGDRVITKSTRTWSLPTYNNHLYKQINSNSDVTDEKYFGYSTPWGYFDFNRFHCHFSPRDWQRLINNHWGMRPKRLNFKLFNIQVKEVTTNDGTTTIANNLTSTVQIFGDSEYQLPYVLGNAHEGCLPPFPADVFMLPQYGYLTLNDGNQVIPQSSFYCLEYFPSQMLRTGNNFSFSYEFENVPFHSMFMHNQSLDRLMNPLMDQYLWYLTATNGVQLHFKKSKKGAFASQFRNWLPGPNQRRQQWSKGAGNNNAQTNLWSRKNKYRIMNRDSVAAPGLAQAAADGFITADGQLIFSNAGQQSDEAAGAKPPTTLLITDESETRPTNPGANTKWGEVADNQQTSSTAPTMAIDNEAHIFPGMVWQDRDIYLQGPIWAKIPETDGHFHPSPLMGGFGLRNPPPQILIKNTPVPANPPETFNANKINSFITQYSTGQVTVEIEWELKKEHSKRWNPEVQYTSNFCSADSLQFTVNGEGVYIEDRPIGTRYLSHNI

SEQ ID NO: 468 - protein, 736 aa, synthetic construct
MSRVVMSFVDHPPDWLKEAAGGLREFLDLEPGAPKPKPNQQKQDQRGLVLPGYKYLGPFNGLDKGQPVNKADEVAREHDLEYNKLLEAGDNPYLKYNHADQEFQEKLEGDTSFGGNLGRAVFQAKKRVLEPFGLAEEAPAKTAPGKKRPRPIEPPPSSENSVDEDLVERQAQRQRLGFQDGPGNSANQVQQQPAANMASAEVAAGSGGPMGDNAQGADGVGSSSGNWHCDSLWMGDRVMRFPWMGDRVITKSTRTWSLPTYNNHLYKQINSNSDVTDEKYFGYSTPWGYFDFNRFHCHFSPRDWQRLINNHWGMRPKRLNFKLFNIQVKEVTTNDGTTTIANNLTSTVQIFGDSEYQLPYVLGNAHEGCLPPFPADVFMLPQYGYLTLNDGNQVIPQSSFYCLEYFPSQMLRTGNNFSFSYEFENVPFHSMFMHNQSLDRLMNPLMDQYLWYLTATNGVQLHFKKSKKGAFASQFRNWLPGPNQRRQQWSKGAGNNNAQTILWSRKNKYRIMNRDSVAAPGLAQAAADGFITADGQLIFSNAGQQSDEAAGAKPPTTLLITDESETRPTNPGANTKWGEVADNQQTSSTAPTMAIDNEAHIFPGMVWQDRDIYLQGPIWAKIPETDGHFHPSPLMGGFGLRNPPPQILIKNTPVPANPPETFNANKINSFITQYSTGQVTVEIEWELKKEHSKRWNPEVQYTSNFCSADSLQFTVNGEGVYIEDRPIGTRYLSHNI

SEQ ID NO: 469 - protein, 736 aa, synthetic construct
MSRVVMSFVDHPPDWLKEAAGGLREFLDLEPGAPKPKPNQQKQDQRGLVLPGYKYLGPFNGLDKGQPVNKADEVAREHDLEYNKLLEAGDNPYLKYNHADQEFQEKLEGDTSFGGNLGRAVFQAKKRVLEPFGLAEEAPAKTAPGKKRPRPIEPPPSSENSVDEDLVERQAQRQRLGFQDGPGNSANQVQQQPAANMASAEVAAGSGGPMGDNAQGADGVGSSSGNWHCDSLWMGDRVMRFPWMGDRVITKSTRTWSLPTYNNHLYKQINSNSDVTDEKYFGYSTPWGYFDFNRFHCHFSPRDWQRLINNHWGMRPKRLNFKLFNIQVKEVTTNDGTTTIANNLTSTVQIFADSEYQLPYVLGNAHEGCLPPFPADVFMLPQYGYLTLNDGNQVIPQSSFYCLEYFPSQMLRTGNNFSFSYEFENVPFHSMFMHNQSLDRLMNPLMDQYLWYLTATNGVQLHFKKSKKGAFASQFRNWLPGPNQRRQQWSKGAGNNNAQTNLWSYKNKYRIMNRDSVAAPGLAQAAADGFITADGQLIFSNAGQQSDEAAGAKPPTTLLITDESETRPTNPGANTKWGEVADNQQTSSTAPTMAIDNEAHIFPGMVWQDRDIYLQGPIWAKIPETDGHFHPSPLMGGFGLRNPPPQILIKNTPVPANPPETFNANKINSFITQYSTGQVTVEIEWELKKEHSKRWNPEVQYTSNLASADSLQFTVNGEGVYIEDRPIGTRYLSHNI

SEQ ID NO: 470 - protein, 736 aa, synthetic construct
MSRVVMSFVDHPPDWLKEAAGGLREFLDLEPGAPKPKPNQQKQDQRGLVLPGYKYLGPFNGLDKGQPVNKADEVAREHDLEYNKLLEAGDNPYLKYNHADQEFQEKLEGDTSFGGNLGRAVFQAKKRVLEPFGLAEEAPAKTAPGKKRPRPIEPPPSSENSVDEDLVERQAQRQRLGFQDGPGNSANQVQQQPAANMASAEVAAGSGGPMGDNAQGADGVGSSSGNWHCDSLWMGDRVMRFPWMGDRVITKSTRTWSLPTYNNHLYKQINSNSDVTDEKYFGYSTPWGYFDFNRFHCHFSPRDWQRLINNHWGMRPKRLNFKLFNIQVKEVTTNDGTTTIANNLTSTVQIFADSEYQLPYVLGNAHEGCLPPFPADVFMLPQYGYLTLNDGNQVIPQSSFYCLEYFPSQMLRTGNNFSFSYEFENVPFHSMFMHNQSLDRLMNPLMDQYLWYLTATNGVQLHFKKSKKGAFASQFRNWLPGPNQRRQQWSKGAGNNNAQTILWSYKNKYRIMNRDSVAAPGLAQAAADGFITADGQLIFSNAGQQSDEAAGAKPPTTLLITDESETRPTNPGANTKWGEVADNQQTSSTAPTMAIDNEAHIFPGMVWQDRDIYLQGPIWAKIPETDGHFHPSPLMGGFGLRNPPPQILIKNTPVPANPPETFNANKINSFITQYSTGQVTVEIEWELKKEHSKRWNPEVQYTSNLASADSLQFTVNGEGVYIEDRPIGTRYLSHNI

SEQ ID NO: 471 - protein, 736 aa, synthetic construct
MSRVVMSFVDHPPDWLKEAAGGLREFLDLEPGAPKPKPNQQKQDQRGLVLPGYKYLGPFNGLDKGQPVNKADEVAREHDLEYNKLLEAGDNPYLKYNHADQEFQEKLEGDTSFGGNLGRAVFQAKKRVLEPFGLAEEAPAKTAPGKKRPRPIEPPPSSENSVDEDLVERQAQRQRLGFQDGPGNSANQVQQQPAANMASAEVAAGSGGPMGDNAQGADGVGSSSGNWHCDSLWMGDRVMRFPWMGDRVITKSTRTWSLPTYNNHLYKQINSNSDVTDEKYFGYSTPWGYFDFNRFHCHFSPRDWQRLINNHWGMRPKRLNFKLFNIQVKEVTTNDGTTTIANNLTSTVQIFADSEYQLPYVLGNAHEGCLPPFPADVFMLPQYGYLTLNDGNQVIPQSSFYCLEYFPSQMLRTGNNFSFSYEFENVPFHSMFMHNQSLDRLMNPLMDQYLWYLTATNGVQLHFKKSKKGAFASQFRNWLPGPNQRRQQWSKGAGNNNAQTNLWSRKNKYRIMNRDSVAAPGLAQAAADGFITADGQLIFSNAGQQSDEAAGAKPPTTLLITDESETRPTNPGANTKWGEVADNQQTSSTAPTMAIDNEAHIFPGMVWQDRDIYLQGPIWAKIPETDGHFHPSPLMGGFGLRNPPPQILIKNTPVPANPPETFNANKINSFITQYSTGQVTVEIEWELKKEHSKRWNPEVQYTSNLASADSLQFTVNGEGVYIEDRPIGTRYLSHNI

SEQ ID NO: 472 - protein, 736 aa, synthetic construct
MSRVVMSFVDHPPDWLKEAAGGLREFLDLEPGAPKPKPNQQKQDQRGLVLPGYKYLGPFNGLDKGQPVNKADEVAREHDLEYNKLLEAGDNPYLKYNHADQEFQEKLEGDTSFGGNLGRAVFQAKKRVLEPFGLAEEAPAKTAPGKKRPRPIEPPPSSENSVDEDLVERQAQRQRLGFQDGPGNSANQVQQQPAANMASAEVAAGSGGPMGDNAQGADGVGSSSGNWHCDSLWMGDRVMRFPWMGDRVITKSTRTWSLPTYNNHLYKQINSNSDVTDEKYFGYSTPWGYFDFNRFHCHFSPRDWQRLINNHWGMRPKRLNFKLFNIQVKEVTTNDGTTTIANNLTSTVQIFADSEYQLPYVLGNAHEGCLPPFPADVFMLPQYGYLTLNDGNQVIPQSSFYCLEYFPSQMLRTGNNFSFSYEFENVPFHSMFMHNQSLDRLMNPLMDQYLWYLTATNGVQLHFKKSKKGAFASQFRNWLPGPNQRRQQWSKGAGNNNAQTNLWSYKNKYRIMNRDSVAAPGLAQAAADGFITADGQLIFSNAGQQSDEAAGAKPPTTLLITDESETRPTNPGANTKWGEVADNQQTSSTAPTMAIDNEAHIFPGMVWQDRDIYLQGPIWAKIPETDGHFHPSPLMGGFGLRNPPPQILIKNTPVPANPPETFNANKINSFITQYSTGQVTVEIEWELKKEHSKRWNPEVQYTSNLCSADSLQFTVNGEGVYIEDRPIGTRYLSHNI

SEQ ID NO: 473 - protein, 736 aa, synthetic construct
MSRVVMSFVDHPPDWLKEAAGGLREFLDLEPGAPKPKPNQQKQDQRGLVLPGYKYLGPFNGLDKGQPVNKADEVAREHDLEYNKLLEAGDNPYLKYNHADQEFQEKLEGDTSFGGNLGRAVFQAKKRVLEPFGLAEEAPAKTAPGKKRPRPIEPPPSSENSVDEDLVERQAQRQRLGFQDGPGNSANQVQQQPAANMASAEVAAGSGGPMGDNAQGADGVGSSSGNWHCDSLWMGDRVMRFPWMGDRVITKSTRTWSLPTYNNHLYKQINSNSDVTDEKYFGYSTPWGYFDFNRFHCHFSPRDWQRLINNHWGMRPKRLNFKLFNIQVKEVTTNDGTTTIANNLTSTVQIFADSEYQLPYVLGNAHEGCLPPFPADVFMLPQYGYLTLNDGNQVIPQSSFYCLEYFPSQMLRTGNNFSFSYEFENVPFHSMFMHNQSLDRLMNPLMDQYLWYLTATNGVQLHFKKSKKGAFASQFRNWLPGPNQRRQQWSKGAGNNNAQTILWSRKNKYRIMNRDSVAAPGLAQAAADGFITADGQLIFSNAGQQSDEAAGAKPPTTLLITDESETRPTNPGANTKWGEVADNQQTSSTAPTMAIDNEAHIFPGMVWQDRDIYLQGPIWAKIPETDGHFHPSPLMGGFGLRNPPPQILIKNTPVPANPPETFNANKINSFITQYSTGQVTVEIEWELKKEHSKRWNPEVQYTSNLASADSLQFTVNGEGVYIEDRPIGTRYLSHNI

SEQ ID NO: 474 - protein, 736 aa, synthetic construct
MSRVVMSFVDHPPDWLKEAAGGLREFLDLEPGAPKPKPNQQKQDQRGLVLPGYKYLGPFNGLDKGQPVNKADEVAREHDLEYNKLLEAGDNPYLKYNHADQEFQEKLEGDTSFGGNLGRAVFQAKKRVLEPFGLAEEAPAKTAPGKKRPRPIEPPPSSENSVDEDLVERQAQRQRLGFQDGPGNSANQVQQQPAANMASAEVAAGSGGPMGDNAQGADGVGSSSGNWHCDSLWMGDRVMRFPWMGDRVITKSTRTWSLPTYNNHLYKQINSNSDVTDEKYFGYSTPWGYFDFNRFHCHFSPRDWQRLINNHWGMRPKRLNFKLFNIQVKEVTTNDGTTTIANNLTSTVQIFADSEYQLPYVLGNAHEGCLPPFPADVFMLPQYGYLTLNDGNQVIPQSSFYCLEYFPSQMLRTGNNFSFSYEFENVPFHSMFMHNQSLDRLMNPLMDQYLWYLTATNGVQLHFKKSKKGAFASQFRNWLPGPNQRRQQWSKGAGNNNAQTILWSYKNKYRIMNRDSVAAPGLAQAAADGFITADGQLIFSNAGQQSDEAAGAKPPTTLLITDESETRPTNPGANTKWGEVADNQQTSSTAPTMAIDNEAHIFPGMVWQDRDIYLQGPIWAKIPETDGHFHPSPLMGGFGLRNPPPQILIKNTPVPANPPETFNANKINSFITQYSTGQVTVEIEWELKKEHSKRWNPEVQYTSNLCSADSLQFTVNGEGVYIEDRPIGTRYLSHNI

SEQ ID NO: 475 - protein, 736 aa, synthetic construct
MSRVVMSFVDHPPDWLKEAAGGLREFLDLEPGAPKPKPNQQKQDQRGLVLPGYKYLGPFNGLDKGQPVNKADEVAREHDLEYNKLLEAGDNPYLKYNHADQEFQEKLEGDTSFGGNLGRAVFQAKKRVLEPFGLAEEAPAKTAPGKKRPRPIEPPPSSENSVDEDLVERQAQRQRLGFQDGPGNSANQVQQQPAANMASAEVAAGSGGPMGDNAQGADGVGSSSGNWHCDSLWMGDRVMRFPWMGDRVITKSTRTWSLPTYNNHLYKQINSNSDVTDEKYFGYSTPWGYFDFNRFHCHFSPRDWQRLINNHWGMRPKRLNFKLFNIQVKEVTTNDGTTTIANNLTSTVQIFADSEYQLPYVLGNAHEGCLPPFPADVFMLPQYGYLTLNDGNQVIPQSSFYCLEYFPSQMLRTGNNFSFSYEFENVPFHSMFMHNQSLDRLMNPLMDQYLWYLTATNGVQLHFKKSKKGAFASQFRNWLPGPNQRRQQWSKGAGNNNAQTNLWSRKNKYRIMNRDSVAAPGLAQAAADGFITADGQLIFSNAGQQSDEAAGAKPPTTLLITDESETRPTNPGANTKWGEVADNQQTSSTAPTMAIDNEAHIFPGMVWQDRDIYLQGPIWAKIPETDGHFHPSPLMGGFGLRNPPPQILIKNTPVPANPPETFNANKINSFITQYSTGQVTVEIEWELKKEHSKRWNPEVQYTSNLCSADSLQFTVNGEGVYIEDRPIGTRYLSHNI

SEQ ID NO: 476 - protein, 736 aa, synthetic construct
MSRVVMSFVDHPPDWLKEAAGGLREFLDLEPGAPKPKPNQQKQDQRGLVLPGYKYLGPFNGLDKGQPVNKADEVAREHDLEYNKLLEAGDNPYLKYNHADQEFQEKLEGDTSFGGNLGRAVFQAKKRVLEPFGLAEEAPAKTAPGKKRPRPIEPPPSSENSVDEDLVERQAQRQRLGFQDGPGNSANQVQQQPAANMASAEVAAGSGGPMGDNAQGADGVGSSSGNWHCDSLWMGDRVMRFPWMGDRVITKSTRTWSLPTYNNHLYKQINSNSDVTDEKYFGYSTPWGYFDFNRFHCHFSPRDWQRLINNHWGMRPKRLNFKLFNIQVKEVTTNDGTTTIANNLTSTVQIFADSEYQLPYVLGNAHEGCLPPFPADVFMLPQYGYLTLNDGNQVIPQSSFYCLEYFPSQMLRTGNNFSFSYEFENVPFHSMFMHNQSLDRLMNPLMDQYLWYLTATNGVQLHFKKSKKGAFASQFRNWLPGPNQRRQQWSKGAGNNNAQTILWSRKNKYRIMNRDSVAAPGLAQAAADGFITADGQLIFSNAGQQSDEAAGAKPPTTLLITDESETRPTNPGANTKWGEVADNQQTSSTAPTMAIDNEAHIFPGMVWQDRDIYLQGPIWAKIPETDGHFHPSPLMGGFGLRNPPPQILIKNTPVPANPPETFNANKINSFITQYSTGQVTVEIEWELKKEHSKRWNPEVQYTSNLCSADSLQFTVNGEGVYIEDRPIGTRYLSHNI

SEQ ID NO: 477 - protein, 736 aa, synthetic construct
MSRVVMSFVDHPPDWLKEAAGGLREFLDLEPGAPKPKPNQQKQDQRGLVLPGYKYLGPFNGLDKGQPVNKADEVAREHDLEYNKLLEAGDNPYLKYNHADQEFQEKLEGDTSFGGNLGRAVFQAKKRVLEPFGLAEEAPAKTAPGKKRPRPIEPPPSSENSVDEDLVERQAQRQRLGFQDGPGNSANQVQQQPAANMASAEVAAGSGGPMGDNAQGADGVGSSSGNWHCDSLWMGDRVMRFPWMGDRVITKSTRTWSLPTYNNHLYKQINSNSDVTDEKYFGYSTPWGYFDFNRFHCHFSPRDWQRLINNHWGMRPKRLNFKLFNIQVKEVTTNDGTTTIANNLTSTVQIFGDSEYQLPYVLGNAHEGCLPPFPADVFMLPQYGYLTLNDGNQVIPQSSFYCLEYFPSQMLRTGNNFSFSYEFENVPFHSMFMHNQSLDRLMNPLMDQYLWYLTATNGVQLHFKKSKKGAFASQFRNWLPGPNQRRQQWSKGAGNNNAQTNLWSYKNKYRIMNRDSVAAPGLAQAAADGFITADGQLIFSNAGQQSDEAAGAKPPTTLLITDESETRPTNPGANTKWGEVADNQQTSSTAPTMAIDNEAHIFPGMVWQDRDIYLQGPIWAKIPETDGHFHPSPLMGGFGLRNPPPQILIKNTPVPANPPETFNANKINSFITQYSTGQVTVEIEWELKKEHSKRWNPEVQYTSNLASADSLQFTVNGEGVYIEDRPIGTRYLSHNI

SEQ ID NO: 478 - protein, 736 aa, synthetic construct
MSRVVMSFVDHPPDWLKEAAGGLREFLDLEPGAPKPKPNQQKQDQRGLVLPGYKYLGPFNGLDKGQPVNKADEVAREHDLEYNKLLEAGDNPYLKYNHADQEFQEKLEGDTSFGGNLGRAVFQAKKRVLEPFGLAEEAPAKTAPGKKRPRPIEPPPSSENSVDEDLVERQAQRQRLGFQDGPGNSANQVQQQPAANMASAEVAAGSGGPMGDNAQGADGVGSSSGNWHCDSLWMGDRVMRFPWMGDRVITKSTRTWSLPTYNNHLYKQINSNSDVTDEKYFGYSTPWGYFDFNRFHCHFSPRDWQRLINNHWGMRPKRLNFKLFNIQVKEVTTNDGTTTIANNLTSTVQIFGDSEYQLPYVLGNAHEGCLPPFPADVFMLPQYGYLTLNDGNQVIPQSSFYCLEYFPSQMLRTGNNFSFSYEFENVPFHSMFMHNQSLDRLMNPLMDQYLWYLTATNGVQLHFKKSKKGAFASQFRNWLPGPNQRRQQWSKGAGNNNAQTILWSYKNKYRIMNRDSVAAPGLAQAAADGFITADGQLIFSNAGQQSDEAAGAKPPTTLLITDESETRPTNPGANTKWGEVADNQQTSSTAPTMAIDNEAHIFPGMVWQDRDIYLQGPIWAKIPETDGHFHPSPLMGGFGLRNPPPQILIKNTPVPANPPETFNANKINSFITQYSTGQVTVEIEWELKKEHSKRWNPEVQYTSNLASADSLQFTVNGEGVYIEDRPIGTRYLSHNI

SEQ ID NO: 479 - protein, 736 aa, synthetic construct
MSRVVMSFVDHPPDWLKEAAGGLREFLDLEPGAPKPKPNQQKQDQRGLVLPGYKYLGPFNGLDKGQPVNKADEVAREHDLEYNKLLEAGDNPYLKYNHADQEFQEKLEGDTSFGGNLGRAVFQAKKRVLEPFGLAEEAPAKTAPGKKRPRPIEPPPSSENSVDEDLVERQAQRQRLGFQDGPGNSANQVQQQPAANMASAEVAAGSGGPMGDNAQGADGVGSSSGNWHCDSLWMGDRVMRFPWMGDRVITKSTRTWSLPTYNNHLYKQINSNSDVTDEKYFGYSTPWGYFDFNRFHCHFSPRDWQRLINNHWGMRPKRLNFKLFNIQVKEVTTNDGTTTIANNLTSTVQIFGDSEYQLPYVLGNAHEGCLPPFPADVFMLPQYGYLTLNDGNQVIPQSSFYCLEYFPSQMLRTGNNFSFSYEFENVPFHSMFMHNQSLDRLMNPLMDQYLWYLTATNGVQLHFKKSKKGAFASQFRNWLPGPNQRRQQWSKGAGNNNAQTNLWSRKNKYRIMNRDSVAAPGLAQAAADGFITADGQLIFSNAGQQSDEAAGAKPPTTLLITDESETRPTNPGANTKWGEVADNQQTSSTAPTMAIDNEAHIFPGMVWQDRDIYLQGPIWAKIPETDGHFHPSPLMGGFGLRNPPPQILIKNTPVPANPPETFNANKINSFITQYSTGQVTVEIEWELKKEHSKRWNPEVQYTSNLASADSLQFTVNGEGVYIEDRPIGTRYLSHNI

SEQ ID NO: 480 - protein, 736 aa, synthetic construct
MSRVVMSFVDHPPDWLKEAAGGLREFLDLEPGAPKPKPNQQKQDQRGLVLPGYKYLGPFNGLDKGQPVNKADEVAREHDLEYNKLLEAGDNPYLKYNHADQEFQEKLEGDTSFGGNLGRAVFQAKKRVLEPFGLAEEAPAKTAPGKKRPRPIEPPPSSENSVDEDLVERQAQRQRLGFQDGPGNSANQVQQQPAANMASAEVAAGSGGPMGDNAQGADGVGSSSGNWHCDSLWMGDRVMRFPWMGDRVITKSTRTWSLPTYNNHLYKQINSNSDVTDEKYFGYSTPWGYFDFNRFHCHFSPRDWQRLINNHWGMRPKRLNFKLFNIQVKEVTTNDGTTTIANNLTSTVQIFGDSEYQLPYVLGNAHEGCLPPFPADVFMLPQYGYLTLNDGNQVIPQSSFYCLEYFPSQMLRTGNNFSFSYEFENVPFHSMFMHNQSLDRLMNPLMDQYLWYLTATNGVQLHFKKSKKGAFASQFRNWLPGPNQRRQQWSKGAGNNNAQTNLWSYKNKYRIMNRDSVAAPGLAQAAADGFITADGQLIFSNAGQQSDEAAGAKPPTTLLITDESETRPTNPGANTKWGEVADNQQTSSTAPTMAIDNEAHIFPGMVWQDRDIYLQGPIWAKIPETDGHFHPSPLMGGFGLRNPPPQILIKNTPVPANPPETFNANKINSFITQYSTGQVTVEIEWELKKEHSKRWNPEVQYTSNLCSADSLQFTVNGEGVYIEDRPIGTRYLSHNI

SEQ ID NO: 481 - protein, 736 aa, synthetic construct
MSRVVMSFVDHPPDWLKEAAGGLREFLDLEPGAPKPKPNQQKQDQRGLVLPGYKYLGPFNGLDKGQPVNKADEVAREHDLEYNKLLEAGDNPYLKYNHADQEFQEKLEGDTSFGGNLGRAVFQAKKRVLEPFGLAEEAPAKTAPGKKRPRPIEPPPSSENSVDEDLVERQAQRQRLGFQDGPGNSANQVQQQPAANMASAEVAAGSGGPMGDNAQGADGVGSSSGNWHCDSLWMGDRVMRFPWMGDRVITKSTRTWSLPTYNNHLYKQINSNSDVTDEKYFGYSTPWGYFDFNRFHCHFSPRDWQRLINNHWGMRPKRLNFKLFNIQVKEVTTNDGTTTIANNLTSTVQIFGDSEYQLPYVLGNAHEGCLPPFPADVFMLPQYGYLTLNDGNQVIPQSSFYCLEYFPSQMLRTGNNFSFSYEFENVPFHSMFMHNQSLDRLMNPLMDQYLWYLTATNGVQLHFKKSKKGAFASQFRNWLPGPNQRRQQWSKGAGNNNAQTILWSRKNKYRIMNRDSVAAPGLAQAAADGFITADGQLIFSNAGQQSDEAAGAKPPTTLLITDESETRPTNPGANTKWGEVADNQQTSSTAPTMAIDNEAHIFPGMVWQDRDIYLQGPIWAKIPETDGHFHPSPLMGGFGLRNPPPQILIKNTPVPANPPETFNANKINSFITQYSTGQVTVEIEWELKKEHSKRWNPEVQYTSNLASADSLQFTVNGEGVYIEDRPIGTRYLSHNI

SEQ ID NO: 482 - protein, 736 aa, synthetic construct
MSRVVMSFVDHPPDWLKEAAGGLREFLDLEPGAPKPKPNQQKQDQRGLVLPGYKYLGPFNGLDKGQPVNKADEVAREHDLEYNKLLEAGDNPYLKYNHADQEFQEKLEGDTSFGGNLGRAVFQAKKRVLEPFGLAEEAPAKTAPGKKRPRPIEPPPSSENSVDEDLVERQAQRQRLGFQDGPGNSANQVQQQPAANMASAEVAAGSGGPMGDNAQGADGVGSSSGNWHCDSLWMGDRVMRFPWMGDRVITKSTRTWSLPTYNNHLYKQINSNSDVTDEKYFGYSTPWGYFDFNRFHCHFSPRDWQRLINNHWGMRPKRLNFKLFNIQVKEVTTNDGTTTIANNLTSTVQIFGDSEYQLPYVLGNAHEGCLPPFPADVFMLPQYGYLTLNDGNQVIPQSSFYCLEYFPSQMLRTGNNFSFSYEFENVPFHSMFMHNQSLDRLMNPLMDQYLWYLTATNGVQLHFKKSKKGAFASQFRNWLPGPNQRRQQWSKGAGNNNAQTILWSYKNKYRIMNRDSVAAPGLAQAAADGFITADGQLIFSNAGQQSDEAAGAKPPTTLLITDESETRPTNPGANTKWGEVADNQQTSSTAPTMAIDNEAHIFPGMVWQDRDIYLQGPIWAKIPETDGHFHPSPLMGGFGLRNPPPQILIKNTPVPANPPETFNANKINSFITQYSTGQVTVEIEWELKKEHSKRWNPEVQYTSNLCSADSLQFTVNGEGVYIEDRPIGTRYLSHNI

SEQ ID NO: 483 - protein, 736 aa, synthetic construct
MSRVVMSFVDHPPDWLKEAAGGLREFLDLEPGAPKPKPNQQKQDQRGLVLPGYKYLGPFNGLDKGQPVNKADEVAREHDLEYNKLLEAGDNPYLKYNHADQEFQEKLEGDTSFGGNLGRAVFQAKKRVLEPFGLAEEAPAKTAPGKKRPRPIEPPPSSENSVDEDLVERQAQRQRLGFQDGPGNSANQVQQQPAANMASAEVAAGSGGPMGDNAQGADGVGSSSGNWHCDSLWMGDRVMRFPWMGDRVITKSTRTWSLPTYNNHLYKQINSNSDVTDEKYFGYSTPWGYFDFNRFHCHFSPRDWQRLINNHWGMRPKRLNFKLFNIQVKEVTTNDGTTTIANNLTSTVQIFGDSEYQLPYVLGNAHEGCLPPFPADVFMLPQYGYLTLNDGNQVIPQSSFYCLEYFPSQMLRTGNNFSFSYEFENVPFHSMFMHNQSLDRLMNPLMDQYLWYLTATNGVQLHFKKSKKGAFASQFRNWLPGPNQRRQQWSKGAGNNNAQTNLWSRKNKYRIMNRDSVAAPGLAQAAADGFITADGQLIFSNAGQQSDEAAGAKPPTTLLITDESETRPTNPGANTKWGEVADNQQTSSTAPTMAIDNEAHIFPGMVWQDRDIYLQGPIWAKIPETDGHFHPSPLMGGFGLRNPPPQILIKNTPVPANPPETFNANKINSFITQYSTGQVTVEIEWELKKEHSKRWNPEVQYTSNLCSADSLQFTVNGEGVYIEDRPIGTRYLSHNI

SEQ ID NO: 484 - protein, 736 aa, synthetic construct
MSRVVMSFVDHPPDWLKEAAGGLREFLDLEPGAPKPKPNQQKQDQRGLVLPGYKYLGPFNGLDKGQPVNKADEVAREHDLEYNKLLEAGDNPYLKYNHADQEFQEKLEGDTSFGGNLGRAVFQAKKRVLEPFGLAEEAPAKTAPGKKRPRPIEPPPSSENSVDEDLVERQAQRQRLGFQDGPGNSANQVQQQPAANMASAEVAAGSGGPMGDNAQGADGVGSSSGNWHCDSLWMGDRVMRFPWMGDRVITKSTRTWSLPTYNNHLYKQINSNSDVTDEKYFGYSTPWGYFDFNRFHCHFSPRDWQRLINNHWGMRPKRLNFKLFNIQVKEVTTNDGTTTIANNLTSTVQIFGDSEYQLPYVLGNAHEGCLPPFPADVFMLPQYGYLTLNDGNQVIPQSSFYCLEYFPSQMLRTGNNFSFSYEFENVPFHSMFMHNQSLDRLMNPLMDQYLWYLTATNGVQLHFKKSKKGAFASQFRNWLPGPNQRRQQWSKGAGNNNAQTILWSRKNKYRIMNRDSVAAPGLAQAAADGFITADGQLIFSNAGQQSDEAAGAKPPTTLLITDESETRPTNPGANTKWGEVADNQQTSSTAPTMAIDNEAHIFPGMVWQDRDIYLQGPIWAKIPETDGHFHPSPLMGGFGLRNPPPQILIKNTPVPANPPETFNANKINSFITQYSTGQVTVEIEWELKKEHSKRWNPEVQYTSNLCSADSLQFTVNGEGVYIEDRPIGTRYLSHNI

SEQ ID NO: 485 - protein, 735 aa, synthetic construct
MAADGYLPDWLEDTLSEGIRQWWKLKPGPPPPKPAERHKDDSRGLVLPGYKYLGPFNGLDKGEPVNEADAAALEHDKAYDRQLDSGDNPYLKYNHADAEFQERLKEDTSFGGNLGRAVFQAKKRVLEPLGLVEEPVKTAPGKKRPVEHSPVEPDSSSGTGKAGQQPARKRLNFGQTGDADSVPDPQPLGQPPAAPSGLGTNTMATGSGAPMADNNEGADGVGNSSGNWHCDSTWMGDRVITTSTRTWALPTYNNHLYKQISSQSGASNDNHYFGYSTPWGYFDFNRFHCHFSPRDWQRLINNNWGFRPKRLNFKLFNIQVKEVTQNDGTTTIANNLTSTVQVFGDSEYQLPYVLGSAHQGCLPPFPADVFMVPQYGYLTLNNGSQAVGRSSFYCLEYFPSQMLRTGNNFTFSYTFEDVPFHSSYAHSQSLDRLMNPLIDQYLYYLSRTNTPSGTTTQSRLQFSQAGASDIRDQSRNWLPGPCYRQQRVSKTSADNNNSEYSWTGATKYHLNGRDSLVNPGPAMASHKDDEEKFFPQSGVLIFGKQGSEKTNVDIEKVMITDEEEIRTTNPVATEQYGSVSTNLQRGNRQAATADVNTQGVLPGMVWQDRDVYLQGPIWAKIPHTDGHFHPSPLMGGFGLKHPPPQILIKNTPVPANPSTTFSAAKFASFITQYSTGQVSVEIEWELQKENSKRWNPEIQYTSNYNKSVNVDFTVDTNGVYSEPRPIGTRYLTRNL

SEQ ID NO: 486 - protein, 735 aa, synthetic construct
MAADGYLPDWLEDTLSEGIRQWWKLKPGPPPPKPAERHKDDSRGLVLPGYKYLGPFNGLDKGEPVNEADAAALEHDKAYDRQLDSGDNPYLKYNHADAEFQERLKEDTSFGGNLGRAVFQAKKRVLEPLGLVEEPVKTAPGKKRPVEHSPVEPDSSSGTGKAGQQPARKRLNFGQTGDADSVPDPQPLGQPPAAPSGLGTNTMATGSGAPMADNNEGADGVGNSSGNWHCDSTWMGDRVITTSTRTWALPTYNNHLYKQISSQSGASNDNHYFGYSTPWGYFDFNRFHCHFSPRDWQRLINNNWGFRPKRLNFKLFNIQVKEVTQNDGTTTIANNLTSTVQVFGDSEYQLPYVLGSAHQGCLPPFPADVFMVPQYGYLTLNNGSQAVGRSSFYCLEYFPSQMLRTGNNFTFSYTFEDVPFHSSYAHSQSLDRLMNPLIDQYLYYLSRTNTPSGTTTQSRLQFSQAGASDIRDQSRNWLPGPCYRQQRVSKTSADNNNSEISWTGATKYHLNGRDSLVNPGPAMASHKDDEEKFFPQSGVLIFGKQGSEKTNVDIEKVMITDEEEIRTTNPVATEQYGSVSTNLQRGNRQAATADVNTQGVLPGMVWQDRDVYLQGPIWAKIPHTDGHFHPSPLMGGFGLKHPPPQILIKNTPVPANPSTTFSAAKFASFITQYSTGQVSVEIEWELQKENSKRWNPEIQYTSNYNKSVNVDFTVDTNGVYSEPRPIGTRYLTRNL

SEQ ID NO: 487 - protein, 735 aa, synthetic construct
MAADGYLPDWLEDTLSEGIRQWWKLKPGPPPPKPAERHKDDSRGLVLPGYKYLGPFNGLDKGEPVNEADAAALEHDKAYDRQLDSGDNPYLKYNHADAEFQERLKEDTSFGGNLGRAVFQAKKRVLEPLGLVEEPVKTAPGKKRPVEHSPVEPDSSSGTGKAGQQPARKRLNFGQTGDADSVPDPQPLGQPPAAPSGLGTNTMATGSGAPMADNNEGADGVGNSSGNWHCDSTWMGDRVITTSTRTWALPTYNNHLYKQISSQSGASNDNHYFGYSTPWGYFDFNRFHCHFSPRDWQRLINNNWGFRPKRLNFKLFNIQVKEVTQNDGTTTIANNLTSTVQVFGDSEYQLPYVLGSAHQGCLPPFPADVFMVPQYGYLTLNNGSQAVGRSSFYCLEYFPSQMLRTGNNFTFSYTFEDVPFHSSYAHSQSLDRLMNPLIDQYLYYLSRTNTPSGTTTQSRLQFSQAGASDIRDQSRNWLPGPCYRQQRVSKTSADNNNSEYSWTRATKYHLNGRDSLVNPGPAMASHKDDEEKFFPQSGVLIFGKQGSEKTNVDIEKVMITDEEEIRTTNPVATEQYGSVSTNLQRGNRQAATADVNTQGVLPGMVWQDRDVYLQGPIWAKIPHTDGHFHPSPLMGGFGLKHPPPQILIKNTPVPANPSTTFSAAKFASFITQYSTGQVSVEIEWELQKENSKRWNPEIQYTSNYNKSVNVDFTVDTNGVYSEPRPIGTRYLTRNL

SEQ ID NO: 488 - protein, 735 aa, synthetic construct
MAADGYLPDWLEDTLSEGIRQWWKLKPGPPPPKPAERHKDDSRGLVLPGYKYLGPFNGLDKGEPVNEADAAALEHDKAYDRQLDSGDNPYLKYNHADAEFQERLKEDTSFGGNLGRAVFQAKKRVLEPLGLVEEPVKTAPGKKRPVEHSPVEPDSSSGTGKAGQQPARKRLNFGQTGDADSVPDPQPLGQPPAAPSGLGTNTMATGSGAPMADNNEGADGVGNSSGNWHCDSTWMGDRVITTSTRTWALPTYNNHLYKQISSQSGASNDNHYFGYSTPWGYFDFNRFHCHFSPRDWQRLINNNWGFRPKRLNFKLFNIQVKEVTQNDGTTTIANNLTSTVQVFGDSEYQLPYVLGSAHQGCLPPFPADVFMVPQYGYLTLNNGSQAVGRSSFYCLEYFPSQMLRTGNNFTFSYTFEDVPFHSSYAHSQSLDRLMNPLIDQYLYYLSRTNTPSGTTTQSRLQFSQAGASDIRDQSRNWLPGPCYRQQRVSKTSADNNNSEYSWTGATKYHLNGRDSLVNPGPAMASHKDDEEKFFPQSGVLIFGKQGSEKTNVDIEKVMITDEEEIRTTNPVATEQYGSVSTNLQRGNRQAATADVNTQGVLPGMVWQDRDVYLQGPIWAKIPHTDGHFHPSPLMGGFGLKHPPPQILIKNTPVPANPSTTFSAAKFASFITQYSTGQVSVEIEWELQKENSKRWNPEIQYTSNYCKSVNVDFTVDTNGVYSEPRPIGTRYLTRNL

SEQ ID NO: 489 - protein, 735 aa, synthetic construct
MAADGYLPDWLEDTLSEGIRQWWKLKPGPPPPKPAERHKDDSRGLVLPGYKYLGPFNGLDKGEPVNEADAAALEHDKAYDRQLDSGDNPYLKYNHADAEFQERLKEDTSFGGNLGRAVFQAKKRVLEPLGLVEEPVKTAPGKKRPVEHSPVEPDSSSGTGKAGQQPARKRLNFGQTGDADSVPDPQPLGQPPAAPSGLGTNTMATGSGAPMADNNEGADGVGNSSGNWHCDSTWMGDRVITTSTRTWALPTYNNHLYKQISSQSGASNDNHYFGYSTPWGYFDFNRFHCHFSPRDWQRLINNNWGFRPKRLNFKLFNIQVKEVTQNDGTTTIANNLTSTVQVFGDSEYQLPYVLGSAHQGCLPPFPADVFMVPQYGYLTLNNGSQAVGRSSFYCLEYFPSQMLRTGNNFTFSYTFEDVPFHSSYAHSQSLDRLMNPLIDQYLYYLSRTNTPSGTTTQSRLQFSQAGASDIRDQSRNWLPGPCYRQQRVSKTSADNNNSEISWTRATKYHLNGRDSLVNPGPAMASHKDDEEKFFPQSGVLIFGKQGSEKTNVDIEKVMITDEEEIRTTNPVATEQYGSVSTNLQRGNRQAATADVNTQGVLPGMVWQDRDVYLQGPIWAKIPHTDGHFHPSPLMGGFGLKHPPPQILIKNTPVPANPSTTFSAAKFASFITQYSTGQVSVEIEWELQKENSKRWNPEIQYTSNYNKSVNVDFTVDTNGVYSEPRPIGTRYLTRNL

SEQ ID NO: 490 - protein, 735 aa, synthetic construct
MAADGYLPDWLEDTLSEGIRQWWKLKPGPPPPKPAERHKDDSRGLVLPGYKYLGPFNGLDKGEPVNEADAAALEHDKAYDRQLDSGDNPYLKYNHADAEFQERLKEDTSFGGNLGRAVFQAKKRVLEPLGLVEEPVKTAPGKKRPVEHSPVEPDSSSGTGKAGQQPARKRLNFGQTGDADSVPDPQPLGQPPAAPSGLGTNTMATGSGAPMADNNEGADGVGNSSGNWHCDSTWMGDRVITTSTRTWALPTYNNHLYKQISSQSGASNDNHYFGYSTPWGYFDFNRFHCHFSPRDWQRLINNNWGFRPKRLNFKLFNIQVKEVTQNDGTTTIANNLTSTVQVFGDSEYQLPYVLGSAHQGCLPPFPADVFMVPQYGYLTLNNGSQAVGRSSFYCLEYFPSQMLRTGNNFTFSYTFEDVPFHSSYAHSQSLDRLMNPLIDQYLYYLSRTNTPSGTTTQSRLQFSQAGASDIRDQSRNWLPGPCYRQQRVSKTSADNNNSEISWTGATKYHLNGRDSLVNPGPAMASHKDDEEKFFPQSGVLIFGKQGSEKTNVDIEKVMITDEEEIRTTNPVATEQYGSVSTNLQRGNRQAATADVNTQGVLPGMVWQDRDVYLQGPIWAKIPHTDGHFHPSPLMGGFGLKHPPPQILIKNTPVPANPSTTFSAAKFASFITQYSTGQVSVEIEWELQKENSKRWNPEIQYTSNYCKSVNVDFTVDTNGVYSEPRPIGTRYLTRNL

SEQ ID NO: 491 - protein, 735 aa, synthetic construct
MAADGYLPDWLEDTLSEGIRQWWKLKPGPPPPKPAERHKDDSRGLVLPGYKYLGPFNGLDKGEPVNEADAAALEHDKAYDRQLDSGDNPYLKYNHADAEFQERLKEDTSFGGNLGRAVFQAKKRVLEPLGLVEEPVKTAPGKKRPVEHSPVEPDSSSGTGKAGQQPARKRLNFGQTGDADSVPDPQPLGQPPAAPSGLGTNTMATGSGAPMADNNEGADGVGNSSGNWHCDSTWMGDRVITTSTRTWALPTYNNHLYKQISSQSGASNDNHYFGYSTPWGYFDFNRFHCHFSPRDWQRLINNNWGFRPKRLNFKLFNIQVKEVTQNDGTTTIANNLTSTVQVFGDSEYQLPYVLGSAHQGCLPPFPADVFMVPQYGYLTLNNGSQAVGRSSFYCLEYFPSQMLRTGNNFTFSYTFEDVPFHSSYAHSQSLDRLMNPLIDQYLYYLSRTNTPSGTTTQSRLQFSQAGASDIRDQSRNWLPGPCYRQQRVSKTSADNNNSEYSWTRATKYHLNGRDSLVNPGPAMASHKDDEEKFFPQSGVLIFGKQGSEKTNVDIEKVMITDEEEIRTTNPVATEQYGSVSTNLQRGNRQAATADVNTQGVLPGMVWQDRDVYLQGPIWAKIPHTDGHFHPSPLMGGFGLKHPPPQILIKNTPVPANPSTTFSAAKFASFITQYSTGQVSVEIEWELQKENSKRWNPEIQYTSNYCKSVNVDFTVDTNGVYSEPRPIGTRYLTRNL

SEQ ID NO: 492 - protein, 735 aa, synthetic construct
MAADGYLPDWLEDTLSEGIRQWWKLKPGPPPPKPAERHKDDSRGLVLPGYKYLGPFNGLDKGEPVNEADAAALEHDKAYDRQLDSGDNPYLKYNHADAEFQERLKEDTSFGGNLGRAVFQAKKRVLEPLGLVEEPVKTAPGKKRPVEHSPVEPDSSSGTGKAGQQPARKRLNFGQTGDADSVPDPQPLGQPPAAPSGLGTNTMATGSGAPMADNNEGADGVGNSSGNWHCDSTWMGDRVITTSTRTWALPTYNNHLYKQISSQSGASNDNHYFGYSTPWGYFDFNRFHCHFSPRDWQRLINNNWGFRPKRLNFKLFNIQVKEVTQNDGTTTIANNLTSTVQVFGDSEYQLPYVLGSAHQGCLPPFPADVFMVPQYGYLTLNNGSQAVGRSSFYCLEYFPSQMLRTGNNFTFSYTFEDVPFHSSYAHSQSLDRLMNPLIDQYLYYLSRTNTPSGTTTQSRLQFSQAGASDIRDQSRNWLPGPCYRQQRVSKTSADNNNSEISWTRATKYHLNGRDSLVNPGPAMASHKDDEEKFFPQSGVLIFGKQGSEKTNVDIEKVMITDEEEIRTTNPVATEQYGSVSTNLQRGNRQAATADVNTQGVLPGMVWQDRDVYLQGPIWAKIPHTDGHFHPSPLMGGFGLKHPPPQILIKNTPVPANPSTTFSAAKFASFITQYSTGQVSVEIEWELQKENSKRWNPEIQYTSNYCKSVNVDFTVDTNGVYSEPRPIGTRYLTRNL

SEQ ID NO: 493 - protein, 735 aa, synthetic construct
MAADGYLPDWLEDTLSEGIRQWWKLKPGPPPPKPAERHKDDSRGLVLPGYKYLGPFNGLDKGEPVNEADAAALEHDKAYDRQLDSGDNPYLKYNHADAEFQERLKEDTSFGGNLGRAVFQAKKRVLEPLGLVEEPVKTAPGKKRPVEHSPVEPDSSSGTGKAGQQPARKRLNFGQTGDADSVPDPQPLGQPPAAPSGLGTNTMATGSGAPMADNNEGADGVGNSSGNWHCDSTWMGDRVITTSTRTWALPTYNNHLYKQISSQSGASNDNHYFGYSTPWGYFDFNRFHCHFSPRDWQRLINNNWGFRPKRLNFKLFNIQVKEVTQNDGTTTIANNLTSTVQVFTDSEYQLPYVLGSAHQGCLPPFPADVFMVPQYGYLTLNNGSQAVGRSSFYCLEYFPSQMLRTGNNFTFSYTFEDVPFHSSYAHSQSLDRLMNPLIDQYLYYLSRTNTPSGTTTQSRLQFSQAGASDIRDQSRNWLPGPCYRQQRVSKTSADNNNSEYSWTGATKYHLNGRDSLVNPGPAMASHKDDEEKFFPQSGVLIFGKQGSEKTNVDIEKVMITDEEEIRTTNPVATEQYGSVSTNLQRGNRQAATADVNTQGVLPGMVWQDRDVYLQGPIWAKIPHTDGHFHPSPLMGGFGLKHPPPQILIKNTPVPANPSTTFSAAKFASFITQYSTGQVSVEIEWELQKENSKRWNPEIQYTSNLNKSVNVDFTVDTNGVYSEPRPIGTRYLTRNL

SEQ ID NO: 494 - protein, 735 aa, synthetic construct
MAADGYLPDWLEDTLSEGIRQWWKLKPGPPPPKPAERHKDDSRGLVLPGYKYLGPFNGLDKGEPVNEADAAALEHDKAYDRQLDSGDNPYLKYNHADAEFQERLKEDTSFGGNLGRAVFQAKKRVLEPLGLVEEPVKTAPGKKRPVEHSPVEPDSSSGTGKAGQQPARKRLNFGQTGDADSVPDPQPLGQPPAAPSGLGTNTMATGSGAPMADNNEGADGVGNSSGNWHCDSTWMGDRVITTSTRTWALPTYNNHLYKQISSQSGASNDNHYFGYSTPWGYFDFNRFHCHFSPRDWQRLINNNWGFRPKRLNFKLFNIQVKEVTQNDGTTTIANNLTSTVQVFTDSEYQLPYVLGSAHQGCLPPFPADVFMVPQYGYLTLNNGSQAVGRSSFYCLEYFPSQMLRTGNNFTFSYTFEDVPFHSSYAHSQSLDRLMNPLIDQYLYYLSRTNTPSGTTTQSRLQFSQAGASDIRDQSRNWLPGPCYRQQRVSKTSADNNNSEISWTGATKYHLNGRDSLVNPGPAMASHKDDEEKFFPQSGVLIFGKQGSEKTNVDIEKVMITDEEEIRTTNPVATEQYGSVSTNLQRGNRQAATADVNTQGVLPGMVWQDRDVYLQGPIWAKIPHTDGHFHPSPLMGGFGLKHPPPQILIKNTPVPANPSTTFSAAKFASFITQYSTGQVSVEIEWELQKENSKRWNPEIQYTSNLNKSVNVDFTVDTNGVYSEPRPIGTRYLTRNL

SEQ ID NO: 495 - protein, 735 aa, synthetic construct
MAADGYLPDWLEDTLSEGIRQWWKLKPGPPPPKPAERHKDDSRGLVLPGYKYLGPFNGLDKGEPVNEADAAALEHDKAYDRQLDSGDNPYLKYNHADAEFQERLKEDTSFGGNLGRAVFQAKKRVLEPLGLVEEPVKTAPGKKRPVEHSPVEPDSSSGTGKAGQQPARKRLNFGQTGDADSVPDPQPLGQPPAAPSGLGTNTMATGSGAPMADNNEGADGVGNSSGNWHCDSTWMGDRVITTSTRTWALPTYNNHLYKQISSQSGASNDNHYFGYSTPWGYFDFNRFHCHFSPRDWQRLINNNWGFRPKRLNFKLFNIQVKEVTQNDGTTTIANNLTSTVQVFTDSEYQLPYVLGSAHQGCLPPFPADVFMVPQYGYLTLNNGSQAVGRSSFYCLEYFPSQMLRTGNNFTFSYTFEDVPFHSSYAHSQSLDRLMNPLIDQYLYYLSRTNTPSGTTTQSRLQFSQAGASDIRDQSRNWLPGPCYRQQRVSKTSADNNNSEYSWTRATKYHLNGRDSLVNPGPAMASHKDDEEKFFPQSGVLIFGKQGSEKTNVDIEKVMITDEEEIRTTNPVATEQYGSVSTNLQRGNRQAATADVNTQGVLPGMVWQDRDVYLQGPIWAKIPHTDGHFHPSPLMGGFGLKHPPPQILIKNTPVPANPSTTFSAAKFASFITQYSTGQVSVEIEWELQKENSKRWNPEIQYTSNLNKSVNVDFTVDTNGVYSEPRPIGTRYLTRNL

SEQ ID NO: 496 - protein, 735 aa, synthetic construct
MAADGYLPDWLEDTLSEGIRQWWKLKPGPPPPKPAERHKDDSRGLVLPGYKYLGPFNGLDKGEPVNEADAAALEHDKAYDRQLDSGDNPYLKYNHADAEFQERLKEDTSFGGNLGRAVFQAKKRVLEPLGLVEEPVKTAPGKKRPVEHSPVEPDSSSGTGKAGQQPARKRLNFGQTGDADSVPDPQPLGQPPAAPSGLGTNTMATGSGAPMADNNEGADGVGNSSGNWHCDSTWMGDRVITTSTRTWALPTYNNHLYKQISSQSGASNDNHYFGYSTPWGYFDFNRFHCHFSPRDWQRLINNNWGFRPKRLNFKLFNIQVKEVTQNDGTTTIANNLTSTVQVFTDSEYQLPYVLGSAHQGCLPPFPADVFMVPQYGYLTLNNGSQAVGRSSFYCLEYFPSQMLRTGNNFTFSYTFEDVPFHSSYAHSQSLDRLMNPLIDQYLYYLSRTNTPSGTTTQSRLQFSQAGASDIRDQSRNWLPGPCYRQQRVSKTSADNNNSEYSWTGATKYHLNGRDSLVNPGPAMASHKDDEEKFFPQSGVLIFGKQGSEKTNVDIEKVMITDEEEIRTTNPVATEQYGSVSTNLQRGNRQAATADVNTQGVLPGMVWQDRDVYLQGPIWAKIPHTDGHFHPSPLMGGFGLKHPPPQILIKNTPVPANPSTTFSAAKFASFITQYSTGQVSVEIEWELQKENSKRWNPEIQYTSNLCKSVNVDFTVDTNGVYSEPRPIGTRYLTRNL

SEQ ID NO: 497 - protein, 735 aa, synthetic construct
MAADGYLPDWLEDTLSEGIRQWWKLKPGPPPPKPAERHKDDSRGLVLPGYKYLGPFNGLDKGEPVNEADAAALEHDKAYDRQLDSGDNPYLKYNHADAEFQERLKEDTSFGGNLGRAVFQAKKRVLEPLGLVEEPVKTAPGKKRPVEHSPVEPDSSSGTGKAGQQPARKRLNFGQTGDADSVPDPQPLGQPPAAPSGLGTNTMATGSGAPMADNNEGADGVGNSSGNWHCDSTWMGDRVITTSTRTWALPTYNNHLYKQISSQSGASNDNHYFGYSTPWGYFDFNRFHCHFSPRDWQRLINNNWGFRPKRLNFKLFNIQVKEVTQNDGTTTIANNLTSTVQVFTDSEYQLPYVLGSAHQGCLPPFPADVFMVPQYGYLTLNNGSQAVGRSSFYCLEYFPSQMLRTGNNFTFSYTFEDVPFHSSYAHSQSLDRLMNPLIDQYLYYLSRTNTPSGTTTQSRLQFSQAGASDIRDQSRNWLPGPCYRQQRVSKTSADNNNSEISWTRATKYHLNGRDSLVNPGPAMASHKDDEEKFFPQSGVLIFGKQGSEKTNVDIEKVMITDEEEIRTTNPVATEQYGSVSTNLQRGNRQAATADVNTQGVLPGMVWQDRDVYLQGPIWAKIPHTDGHFHPSPLMGGFGLKHPPPQILIKNTPVPANPSTTFSAAKFASFITQYSTGQVSVEIEWELQKENSKRWNPEIQYTSNLNKSVNVDFTVDTNGVYSEPRPIGTRYLTRNL

SEQ ID NO: 498 - protein, 735 aa, synthetic construct
MAADGYLPDWLEDTLSEGIRQWWKLKPGPPPPKPAERHKDDSRGLVLPGYKYLGPFNGLDKGEPVNEADAAALEHDKAYDRQLDSGDNPYLKYNHADAEFQERLKEDTSFGGNLGRAVFQAKKRVLEPLGLVEEPVKTAPGKKRPVEHSPVEPDSSSGTGKAGQQPARKRLNFGQTGDADSVPDPQPLGQPPAAPSGLGTNTMATGSGAPMADNNEGADGVGNSSGNWHCDSTWMGDRVITTSTRTWALPTYNNHLYKQISSQSGASNDNHYFGYSTPWGYFDFNRFHCHFSPRDWQRLINNNWGFRPKRLNFKLFNIQVKEVTQNDGTTTIANNLTSTVQVFTDSEYQLPYVLGSAHQGCLPPFPADVFMVPQYGYLTLNNGSQAVGRSSFYCLEYFPSQMLRTGNNFTFSYTFEDVPFHSSYAHSQSLDRLMNPLIDQYLYYLSRTNTPSGTTTQSRLQFSQAGASDIRDQSRNWLPGPCYRQQRVSKTSADNNNSEISWTGATKYHLNGRDSLVNPGPAMASHKDDEEKFFPQSGVLIFGKQGSEKTNVDIEKVMITDEEEIRTTNPVATEQYGSVSTNLQRGNRQAATADVNTQGVLPGMVWQDRDVYLQGPIWAKIPHTDGHFHPSPLMGGFGLKHPPPQILIKNTPVPANPSTTFSAAKFASFITQYSTGQVSVEIEWELQKENSKRWNPEIQYTSNLCKSVNVDFTVDTNGVYSEPRPIGTRYLTRNL

SEQ ID NO: 499 - protein, 735 aa, synthetic construct
MAADGYLPDWLEDTLSEGIRQWWKLKPGPPPPKPAERHKDDSRGLVLPGYKYLGPFNGLDKGEPVNEADAAALEHDKAYDRQLDSGDNPYLKYNHADAEFQERLKEDTSFGGNLGRAVFQAKKRVLEPLGLVEEPVKTAPGKKRPVEHSPVEPDSSSGTGKAGQQPARKRLNFGQTGDADSVPDPQPLGQPPAAPSGLGTNTMATGSGAPMADNNEGADGVGNSSGNWHCDSTWMGDRVITTSTRTWALPTYNNHLYKQISSQSGASNDNHYFGYSTPWGYFDFNRFHCHFSPRDWQRLINNNWGFRPKRLNFKLFNIQVKEVTQNDGTTTIANNLTSTVQVFTDSEYQLPYVLGSAHQGCLPPFPADVFMVPQYGYLTLNNGSQAVGRSSFYCLEYFPSQMLRTGNNFTFSYTFEDVPFHSSYAHSQSLDRLMNPLIDQYLYYLSRTNTPSGTTTQSRLQFSQAGASDIRDQSRNWLPGPCYRQQRVSKTSADNNNSEYSWTRATKYHLNGRDSLVNPGPAMASHKDDEEKFFPQSGVLIFGKQGSEKTNVDIEKVMITDEEEIRTTNPVATEQYGSVSTNLQRGNRQAATADVNTQGVLPGMVWQDRDVYLQGPIWAKIPHTDGHFHPSPLMGGFGLKHPPPQILIKNTPVPANPSTTFSAAKFASFITQYSTGQVSVEIEWELQKENSKRWNPEIQYTSNLCKSVNVDFTVDTNGVYSEPRPIGTRYLTRNL

SEQ ID NO: 500 - protein, 735 aa, synthetic construct
MAADGYLPDWLEDTLSEGIRQWWKLKPGPPPPKPAERHKDDSRGLVLPGYKYLGPFNGLDKGEPVNEADAAALEHDKAYDRQLDSGDNPYLKYNHADAEFQERLKEDTSFGGNLGRAVFQAKKRVLEPLGLVEEPVKTAPGKKRPVEHSPVEPDSSSGTGKAGQQPARKRLNFGQTGDADSVPDPQPLGQPPAAPSGLGTNTMATGSGAPMADNNEGADGVGNSSGNWHCDSTWMGDRVITTSTRTWALPTYNNHLYKQISSQSGASNDNHYFGYSTPWGYFDFNRFHCHFSPRDWQRLINNNWGFRPKRLNFKLFNIQVKEVTQNDGTTTIANNLTSTVQVFTDSEYQLPYVLGSAHQGCLPPFPADVFMVPQYGYLTLNNGSQAVGRSSFYCLEYFPSQMLRTGNNFTFSYTFEDVPFHSSYAHSQSLDRLMNPLIDQYLYYLSRTNTPSGTTTQSRLQFSQAGASDIRDQSRNWLPGPCYRQQRVSKTSADNNNSEISWTRATKYHLNGRDSLVNPGPAMASHKDDEEKFFPQSGVLIFGKQGSEKTNVDIEKVMITDEEEIRTTNPVATEQYGSVSTNLQRGNRQAATADVNTQGVLPGMVWQDRDVYLQGPIWAKIPHTDGHFHPSPLMGGFGLKHPPPQILIKNTPVPANPSTTFSAAKFASFITQYSTGQVSVEIEWELQKENSKRWNPEIQYTSNLCKSVNVDFTVDTNGVYSEPRPIGTRYLTRNL

SEQ ID NO: 501 - protein, 735 aa, synthetic construct
MAADGYLPDWLEDTLSEGIRQWWKLKPGPPPPKPAERHKDDSRGLVLPGYKYLGPFNGLDKGEPVNEADAAALEHDKAYDRQLDSGDNPYLKYNHADAEFQERLKEDTSFGGNLGRAVFQAKKRVLEPLGLVEEPVKTAPGKKRPVEHSPVEPDSSSGTGKAGQQPARKRLNFGQTGDADSVPDPQPLGQPPAAPSGLGTNTMATGSGAPMADNNEGADGVGNSSGNWHCDSTWMGDRVITTSTRTWALPTYNNHLYKQISSQSGASNDNHYFGYSTPWGYFDFNRFHCHFSPRDWQRLINNNWGFRPKRLNFKLFNIQVKEVTQNDGTTTIANNLTSTVQVFGDSEYQLPYVLGSAHQGCLPPFPADVFMVPQYGYLTLNNGSQAVGRSSFYCLEYFPSQMLRTGNNFTFSYTFEDVPFHSSYAHSQSLDRLMNPLIDQYLYYLSRTNTPSGTTTQSRLQFSQAGASDIRDQSRNWLPGPCYRQQRVSKTSADNNNSEYSWTGATKYHLNGRDSLVNPGPAMASHKDDEEKFFPQSGVLIFGKQGSEKTNVDIEKVMITDEEEIRTTNPVATEQYGSVSTNLQRGNRQAATADVNTQGVLPGMVWQDRDVYLQGPIWAKIPHTDGHFHPSPLMGGFGLKHPPPQILIKNTPVPANPSTTFSAAKFASFITQYSTGQVSVEIEWELQKENSKRWNPEIQYTSNLNKSVNVDFTVDTNGVYSEPRPIGTRYLTRNL

SEQ ID NO: 502 - protein, 735 aa, synthetic construct
MAADGYLPDWLEDTLSEGIRQWWKLKPGPPPPKPAERHKDDSRGLVLPGYKYLGPFNGLDKGEPVNEADAAALEHDKAYDRQLDSGDNPYLKYNHADAEFQERLKEDTSFGGNLGRAVFQAKKRVLEPLGLVEEPVKTAPGKKRPVEHSPVEPDSSSGTGKAGQQPARKRLNFGQTGDADSVPDPQPLGQPPAAPSGLGTNTMATGSGAPMADNNEGADGVGNSSGNWHCDSTWMGDRVITTSTRTWALPTYNNHLYKQISSQSGASNDNHYFGYSTPWGYFDFNRFHCHFSPRDWQRLINNNWGFRPKRLNFKLFNIQVKEVTQNDGTTTIANNLTSTVQVFGDSEYQLPYVLGSAHQGCLPPFPADVFMVPQYGYLTLNNGSQAVGRSSFYCLEYFPSQMLRTGNNFTFSYTFEDVPFHSSYAHSQSLDRLMNPLIDQYLYYLSRTNTPSGTTTQSRLQFSQAGASDIRDQSRNWLPGPCYRQQRVSKTSADNNNSEISWTGATKYHLNGRDSLVNPGPAMASHKDDEEKFFPQSGVLIFGKQGSEKTNVDIEKVMITDEEEIRTTNPVATEQYGSVSTNLQRGNRQAATADVNTQGVLPGMVWQDRDVYLQGPIWAKIPHTDGHFHPSPLMGGFGLKHPPPQILIKNTPVPANPSTTFSAAKFASFITQYSTGQVSVEIEWELQKENSKRWNPEIQYTSNLNKSVNVDFTVDTNGVYSEPRPIGTRYLTRNL

SEQ ID NO: 503 - protein, 735 aa, synthetic construct
MAADGYLPDWLEDTLSEGIRQWWKLKPGPPPPKPAERHKDDSRGLVLPGYKYLGPFNGLDKGEPVNEADAAALEHDKAYDRQLDSGDNPYLKYNHADAEFQERLKEDTSFGGNLGRAVFQAKKRVLEPLGLVEEPVKTAPGKKRPVEHSPVEPDSSSGTGKAGQQPARKRLNFGQTGDADSVPDPQPLGQPPAAPSGLGTNTMATGSGAPMADNNEGADGVGNSSGNWHCDSTWMGDRVITTSTRTWALPTYNNHLYKQISSQSGASNDNHYFGYSTPWGYFDFNRFHCHFSPRDWQRLINNNWGFRPKRLNFKLFNIQVKEVTQNDGTTTIANNLTSTVQVFGDSEYQLPYVLGSAHQGCLPPFPADVFMVPQYGYLTLNNGSQAVGRSSFYCLEYFPSQMLRTGNNFTFSYTFEDVPFHSSYAHSQSLDRLMNPLIDQYLYYLSRTNTPSGTTTQSRLQFSQAGASDIRDQSRNWLPGPCYRQQRVSKTSADNNNSEYSWTRATKYHLNGRDSLVNPGPAMASHKDDEEKFFPQSGVLIFGKQGSEKTNVDIEKVMITDEEEIRTTNPVATEQYGSVSTNLQRGNRQAATADVNTQGVLPGMVWQDRDVYLQGPIWAKIPHTDGHFHPSPLMGGFGLKHPPPQILIKNTPVPANPSTTFSAAKFASFITQYSTGQVSVEIEWELQKENSKRWNPEIQYTSNLNKSVNVDFTVDTNGVYSEPRPIGTRYLTRNL

SEQ ID NO: 504 - protein, 735 aa, synthetic construct
MAADGYLPDWLEDTLSEGIRQWWKLKPGPPPPKPAERHKDDSRGLVLPGYKYLGPFNGLDKGEPVNEADAAALEHDKAYDRQLDSGDNPYLKYNHADAEFQERLKEDTSFGGNLGRAVFQAKKRVLEPLGLVEEPVKTAPGKKRPVEHSPVEPDSSSGTGKAGQQPARKRLNFGQTGDADSVPDPQPLGQPPAAPSGLGTNTMATGSGAPMADNNEGADGVGNSSGNWHCDSTWMGDRVITTSTRTWALPTYNNHLYKQISSQSGASNDNHYFGYSTPWGYFDFNRFHCHFSPRDWQRLINNNWGFRPKRLNFKLFNIQVKEVTQNDGTTTIANNLTSTVQVFGDSEYQLPYVLGSAHQGCLPPFPADVFMVPQYGYLTLNNGSQAVGRSSFYCLEYFPSQMLRTGNNFTFSYTFEDVPFHSSYAHSQSLDRLMNPLIDQYLYYLSRTNTPSGTTTQSRLQFSQAGASDIRDQSRNWLPGPCYRQQRVSKTSADNNNSEYSWTGATKYHLNGRDSLVNPGPAMASHKDDEEKFFPQSGVLIFGKQGSEKTNVDIEKVMITDEEEIRTTNPVATEQYGSVSTNLQRGNRQAATADVNTQGVLPGMVWQDRDVYLQGPIWAKIPHTDGHFHPSPLMGGFGLKHPPPQILIKNTPVPANPSTTFSAAKFASFITQYSTGQVSVEIEWELQKENSKRWNPEIQYTSNLCKSVNVDFTVDTNGVYSEPRPIGTRYLTRNL

SEQ ID NO: 505 - protein, 735 aa, synthetic construct
MAADGYLPDWLEDTLSEGIRQWWKLKPGPPPPKPAERHKDDSRGLVLPGYKYLGPFNGLDKGEPVNEADAAALEHDKAYDRQLDSGDNPYLKYNHADAEFQERLKEDTSFGGNLGRAVFQAKKRVLEPLGLVEEPVKTAPGKKRPVEHSPVEPDSSSGTGKAGQQPARKRLNFGQTGDADSVPDPQPLGQPPAAPSGLGTNTMATGSGAPMADNNEGADGVGNSSGNWHCDSTWMGDRVITTSTRTWALPTYNNHLYKQISSQSGASNDNHYFGYSTPWGYFDFNRFHCHFSPRDWQRLINNNWGFRPKRLNFKLFNIQVKEVTQNDGTTTIANNLTSTVQVFGDSEYQLPYVLGSAHQGCLPPFPADVFMVPQYGYLTLNNGSQAVGRSSFYCLEYFPSQMLRTGNNFTFSYTFEDVPFHSSYAHSQSLDRLMNPLIDQYLYYLSRTNTPSGTTTQSRLQFSQAGASDIRDQSRNWLPGPCYRQQRVSKTSADNNNSEISWTRATKYHLNGRDSLVNPGPAMASHKDDEEKFFPQSGVLIFGKQGSEKTNVDIEKVMITDEEEIRTTNPVATEQYGSVSTNLQRGNRQAATADVNTQGVLPGMVWQDRDVYLQGPIWAKIPHTDGHFHPSPLMGGFGLKHPPPQILIKNTPVPANPSTTFSAAKFASFITQYSTGQVSVEIEWELQKENSKRWNPEIQYTSNLNKSVNVDFTVDTNGVYSEPRPIGTRYLTRNL

SEQ ID NO: 506 - protein, 735 aa, synthetic construct
MAADGYLPDWLEDTLSEGIRQWWKLKPGPPPPKPAERHKDDSRGLVLPGYKYLGPFNGLDKGEPVNEADAAALEHDKAYDRQLDSGDNPYLKYNHADAEFQERLKEDTSFGGNLGRAVFQAKKRVLEPLGLVEEPVKTAPGKKRPVEHSPVEPDSSSGTGKAGQQPARKRLNFGQTGDADSVPDPQPLGQPPAAPSGLGTNTMATGSGAPMADNNEGADGVGNSSGNWHCDSTWMGDRVITTSTRTWALPTYNNHLYKQISSQSGASNDNHYFGYSTPWGYFDFNRFHCHFSPRDWQRLINNNWGFRPKRLNFKLFNIQVKEVTQNDGTTTIANNLTSTVQVFGDSEYQLPYVLGSAHQGCLPPFPADVFMVPQYGYLTLNNGSQAVGRSSFYCLEYFPSQMLRTGNNFTFSYTFEDVPFHSSYAHSQSLDRLMNPLIDQYLYYLSRTNTPSGTTTQSRLQFSQAGASDIRDQSRNWLPGPCYRQQRVSKTSADNNNSEISWTGATKYHLNGRDSLVNPGPAMASHKDDEEKFFPQSGVLIFGKQGSEKTNVDIEKVMITDEEEIRTTNPVATEQYGSVSTNLQRGNRQAATADVNTQGVLPGMVWQDRDVYLQGPIWAKIPHTDGHFHPSPLMGGFGLKHPPPQILIKNTPVPANPSTTFSAAKFASFITQYSTGQVSVEIEWELQKENSKRWNPEIQYTSNLCKSVNVDFTVDTNGVYSEPRPIGTRYLTRNL

SEQ ID NO: 507 - protein, 735 aa, synthetic construct
MAADGYLPDWLEDTLSEGIRQWWKLKPGPPPPKPAERHKDDSRGLVLPGYKYLGPFNGLDKGEPVNEADAAALEHDKAYDRQLDSGDNPYLKYNHADAEFQERLKEDTSFGGNLGRAVFQAKKRVLEPLGLVEEPVKTAPGKKRPVEHSPVEPDSSSGTGKAGQQPARKRLNFGQTGDADSVPDPQPLGQPPAAPSGLGTNTMATGSGAPMADNNEGADGVGNSSGNWHCDSTWMGDRVITTSTRTWALPTYNNHLYKQISSQSGASNDNHYFGYSTPWGYFDFNRFHCHFSPRDWQRLINNNWGFRPKRLNFKLFNIQVKEVTQNDGTTTIANNLTSTVQVFGDSEYQLPYVLGSAHQGCLPPFPADVFMVPQYGYLTLNNGSQAVGRSSFYCLEYFPSQMLRTGNNFTFSYTFEDVPFHSSYAHSQSLDRLMNPLIDQYLYYLSRTNTPSGTTTQSRLQFSQAGASDIRDQSRNWLPGPCYRQQRVSKTSADNNNSEYSWTRATKYHLNGRDSLVNPGPAMASHKDDEEKFFPQSGVLIFGKQGSEKTNVDIEKVMITDEEEIRTTNPVATEQYGSVSTNLQRGNRQAATADVNTQGVLPGMVWQDRDVYLQGPIWAKIPHTDGHFHPSPLMGGFGLKHPPPQILIKNTPVPANPSTTFSAAKFASFITQYSTGQVSVEIEWELQKENSKRWNPEIQYTSNLCKSVNVDFTVDTNGVYSEPRPIGTRYLTRNL

SEQ ID NO: 508 - protein, 735 aa, synthetic construct
MAADGYLPDWLEDTLSEGIRQWWKLKPGPPPPKPAERHKDDSRGLVLPGYKYLGPFNGLDKGEPVNEADAAALEHDKAYDRQLDSGDNPYLKYNHADAEFQERLKEDTSFGGNLGRAVFQAKKRVLEPLGLVEEPVKTAPGKKRPVEHSPVEPDSSSGTGKAGQQPARKRLNFGQTGDADSVPDPQPLGQPPAAPSGLGTNTMATGSGAPMADNNEGADGVGNSSGNWHCDSTWMGDRVITTSTRTWALPTYNNHLYKQISSQSGASNDNHYFGYSTPWGYFDFNRFHCHFSPRDWQRLINNNWGFRPKRLNFKLFNIQVKEVTQNDGTTTIANNLTSTVQVFGDSEYQLPYVLGSAHQGCLPPFPADVFMVPQYGYLTLNNGSQAVGRSSFYCLEYFPSQMLRTGNNFTFSYTFEDVPFHSSYAHSQSLDRLMNPLIDQYLYYLSRTNTPSGTTTQSRLQFSQAGASDIRDQSRNWLPGPCYRQQRVSKTSADNNNSEISWTRATKYHLNGRDSLVNPGPAMASHKDDEEKFFPQSGVLIFGKQGSEKTNVDIEKVMITDEEEIRTTNPVATEQYGSVSTNLQRGNRQAATADVNTQGVLPGMVWQDRDVYLQGPIWAKIPHTDGHFHPSPLMGGFGLKHPPPQILIKNTPVPANPSTTFSAAKFASFITQYSTGQVSVEIEWELQKENSKRWNPEIQYTSNLCKSVNVDFTVDTNGVYSEPRPIGTRYLTRNL

SEQ ID NO: 509 - protein, 735 aa, synthetic construct
MAADGYLPDWLEDTLSEGIRQWWKLKPGPPPPKPAERHKDDSRGLVLPGYKYLGPFNGLDKGEPVNEADAAALEHDKAYDRQLDSGDNPYLKYNHADAEFQERLKEDTSFGGNLGRAVFQAKKRVLEPLGLVEEPVKTAPGKKRPVEHSPVEPDSSSGTGKAGQQPARKRLNFGQTGDADSVPDPQPLGQPPAAPSGLGTNTMATGSGAPMADNNEGADGVGNSSGNWHCDSTWMGDRVITTSTRTWALPTYNNHLYKQISSQSGASNDNHYFGYSTPWGYFDFNRFHCHFSPRDWQRLINNNWGFRPKRLNFKLFNIQVKEVTQNDGTTTIANNLTSTVQVFADSEYQLPYVLGSAHQGCLPPFPADVFMVPQYGYLTLNNGSQAVGRSSFYCLEYFPSQMLRTGNNFTFSYTFEDVPFHSSYAHSQSLDRLMNPLIDQYLYYLSRTNTPSGTTTQSRLQFSQAGASDIRDQSRNWLPGPCYRQQRVSKTSADNNNSEYSWTGATKYHLNGRDSLVNPGPAMASHKDDEEKFFPQSGVLIFGKQGSEKTNVDIEKVMITDEEEIRTTNPVATEQYGSVSTNLQRGNRQAATADVNTQGVLPGMVWQDRDVYLQGPIWAKIPHTDGHFHPSPLMGGFGLKHPPPQILIKNTPVPANPSTTFSAAKFASFITQYSTGQVSVEIEWELQKENSKRWNPEIQYTSNLNKSVNVDFTVDTNGVYSEPRPIGTRYLTRNL

SEQ ID NO: 510 - protein, 735 aa, synthetic construct
MAADGYLPDWLEDTLSEGIRQWWKLKPGPPPPKPAERHKDDSRGLVLPGYKYLGPFNGLDKGEPVNEADAAALEHDKAYDRQLDSGDNPYLKYNHADAEFQERLKEDTSFGGNLGRAVFQAKKRVLEPLGLVEEPVKTAPGKKRPVEHSPVEPDSSSGTGKAGQQPARKRLNFGQTGDADSVPDPQPLGQPPAAPSGLGTNTMATGSGAPMADNNEGADGVGNSSGNWHCDSTWMGDRVITTSTRTWALPTYNNHLYKQISSQSGASNDNHYFGYSTPWGYFDFNRFHCHFSPRDWQRLINNNWGFRPKRLNFKLFNIQVKEVTQNDGTTTIANNLTSTVQVFADSEYQLPYVLGSAHQGCLPPFPADVFMVPQYGYLTLNNGSQAVGRSSFYCLEYFPSQMLRTGNNFTFSYTFEDVPFHSSYAHSQSLDRLMNPLIDQYLYYLSRTNTPSGTTTQSRLQFSQAGASDIRDQSRNWLPGPCYRQQRVSKTSADNNNSEISWTGATKYHLNGRDSLVNPGPAMASHKDDEEKFFPQSGVLIFGKQGSEKTNVDIEKVMITDEEEIRTTNPVATEQYGSVSTNLQRGNRQAATADVNTQGVLPGMVWQDRDVYLQGPIWAKIPHTDGHFHPSPLMGGFGLKHPPPQILIKNTPVPANPSTTFSAAKFASFITQYSTGQVSVEIEWELQKENSKRWNPEIQYTSNLNKSVNVDFTVDTNGVYSEPRPIGTRYLTRNL

SEQ ID NO: 511 - protein, 735 aa, synthetic construct
MAADGYLPDWLEDTLSEGIRQWWKLKPGPPPPKPAERHKDDSRGLVLPGYKYLGPFNGLDKGEPVNEADAAALEHDKAYDRQLDSGDNPYLKYNHADAEFQERLKEDTSFGGNLGRAVFQAKKRVLEPLGLVEEPVKTAPGKKRPVEHSPVEPDSSSGTGKAGQQPARKRLNFGQTGDADSVPDPQPLGQPPAAPSGLGTNTMATGSGAPMADNNEGADGVGNSSGNWHCDSTWMGDRVITTSTRTWALPTYNNHLYKQISSQSGASNDNHYFGYSTPWGYFDFNRFHCHFSPRDWQRLINNNWGFRPKRLNFKLFNIQVKEVTQNDGTTTIANNLTSTVQVFADSEYQLPYVLGSAHQGCLPPFPADVFMVPQYGYLTLNNGSQAVGRSSFYCLEYFPSQMLRTGNNFTFSYTFEDVPFHSSYAHSQSLDRLMNPLIDQYLYYLSRTNTPSGTTTQSRLQFSQAGASDIRDQSRNWLPGPCYRQQRVSKTSADNNNSEYSWTRATKYHLNGRDSLVNPGPAMASHKDDEEKFFPQSGVLIFGKQGSEKTNVDIEKVMITDEEEIRTTNPVATEQYGSVSTNLQRGNRQAATADVNTQGVLPGMVWQDRDVYLQGPIWAKIPHTDGHFHPSPLMGGFGLKHPPPQILIKNTPVPANPSTTFSAAKFASFITQYSTGQVSVEIEWELQKENSKRWNPEIQYTSNLNKSVNVDFTVDTNGVYSEPRPIGTRYLTRNL

SEQ ID NO: 512 - protein, 735 aa, synthetic construct
MAADGYLPDWLEDTLSEGIRQWWKLKPGPPPPKPAERHKDDSRGLVLPGYKYLGPFNGLDKGEPVNEADAAALEHDKAYDRQLDSGDNPYLKYNHADAEFQERLKEDTSFGGNLGRAVFQAKKRVLEPLGLVEEPVKTAPGKKRPVEHSPVEPDSSSGTGKAGQQPARKRLNFGQTGDADSVPDPQPLGQPPAAPSGLGTNTMATGSGAPMADNNEGADGVGNSSGNWHCDSTWMGDRVITTSTRTWALPTYNNHLYKQISSQSGASNDNHYFGYSTPWGYFDFNRFHCHFSPRDWQRLINNNWGFRPKRLNFKLFNIQVKEVTQNDGTTTIANNLTSTVQVFADSEYQLPYVLGSAHQGCLPPFPADVFMVPQYGYLTLNNGSQAVGRSSFYCLEYFPSQMLRTGNNFTFSYTFEDVPFHSSYAHSQSLDRLMNPLIDQYLYYLSRTNTPSGTTTQSRLQFSQAGASDIRDQSRNWLPGPCYRQQRVSKTSADNNNSEYSWTGATKYHLNGRDSLVNPGPAMASHKDDEEKFFPQSGVLIFGKQGSEKTNVDIEKVMITDEEEIRTTNPVATEQYGSVSTNLQRGNRQAATADVNTQGVLPGMVWQDRDVYLQGPIWAKIPHTDGHFHPSPLMGGFGLKHPPPQILIKNTPVPANPSTTFSAAKFASFITQYSTGQVSVEIEWELQKENSKRWNPEIQYTSNLCKSVNVDFTVDTNGVYSEPRPIGTRYLTRNL

SEQ ID NO: 513 - protein, 735 aa, synthetic construct
MAADGYLPDWLEDTLSEGIRQWWKLKPGPPPPKPAERHKDDSRGLVLPGYKYLGPFNGLDKGEPVNEADAAALEHDKAYDRQLDSGDNPYLKYNHADAEFQERLKEDTSFGGNLGRAVFQAKKRVLEPLGLVEEPVKTAPGKKRPVEHSPVEPDSSSGTGKAGQQPARKRLNFGQTGDADSVPDPQPLGQPPAAPSGLGTNTMATGSGAPMADNNEGADGVGNSSGNWHCDSTWMGDRVITTSTRTWALPTYNNHLYKQISSQSGASNDNHYFGYSTPWGYFDFNRFHCHFSPRDWQRLINNNWGFRPKRLNFKLFNIQVKEVTQNDGTTTIANNLTSTVQVFADSEYQLPYVLGSAHQGCLPPFPADVFMVPQYGYLTLNNGSQAVGRSSFYCLEYFPSQMLRTGNNFTFSYTFEDVPFHSSYAHSQSLDRLMNPLIDQYLYYLSRTNTPSGTTTQSRLQFSQAGASDIRDQSRNWLPGPCYRQQRVSKTSADNNNSEISWTRATKYHLNGRDSLVNPGPAMASHKDDEEKFFPQSGVLIFGKQGSEKTNVDIEKVMITDEEEIRTTNPVATEQYGSVSTNLQRGNRQAATADVNTQGVLPGMVWQDRDVYLQGPIWAKIPHTDGHFHPSPLMGGFGLKHPPPQILIKNTPVPANPSTTFSAAKFASFITQYSTGQVSVEIEWELQKENSKRWNPEIQYTSNLNKSVNVDFTVDTNGVYSEPRPIGTRYLTRNL

SEQ ID NO: 514 - protein, 735 aa, synthetic construct
MAADGYLPDWLEDTLSEGIRQWWKLKPGPPPPKPAERHKDDSRGLVLPGYKYLGPFNGLDKGEPVNEADAAALEHDKAYDRQLDSGDNPYLKYNHADAEFQERLKEDTSFGGNLGRAVFQAKKRVLEPLGLVEEPVKTAPGKKRPVEHSPVEPDSSSGTGKAGQQPARKRLNFGQTGDADSVPDPQPLGQPPAAPSGLGTNTMATGSGAPMADNNEGADGVGNSSGNWHCDSTWMGDRVITTSTRTWALPTYNNHLYKQISSQSGASNDNHYFGYSTPWGYFDFNRFHCHFSPRDWQRLINNNWGFRPKRLNFKLFNIQVKEVTQNDGTTTIANNLTSTVQVFADSEYQLPYVLGSAHQGCLPPFPADVFMVPQYGYLTLNNGSQAVGRSSFYCLEYFPSQMLRTGNNFTFSYTFEDVPFHSSYAHSQSLDRLMNPLIDQYLYYLSRTNTPSGTTTQSRLQFSQAGASDIRDQSRNWLPGPCYRQQRVSKTSADNNNSEISWTGATKYHLNGRDSLVNPGPAMASHKDDEEKFFPQSGVLIFGKQGSEKTNVDIEKVMITDEEEIRTTNPVATEQYGSVSTNLQRGNRQAATADVNTQGVLPGMVWQDRDVYLQGPIWAKIPHTDGHFHPSPLMGGFGLKHPPPQILIKNTPVPANPSTTFSAAKFASFITQYSTGQVSVEIEWELQKENSKRWNPEIQYTSNLCKSVNVDFTVDTNGVYSEPRPIGTRYLTRNL

SEQ ID NO: 515 - protein, 735 aa, synthetic construct
MAADGYLPDWLEDTLSEGIRQWWKLKPGPPPPKPAERHKDDSRGLVLPGYKYLGPFNGLDKGEPVNEADAAALEHDKAYDRQLDSGDNPYLKYNHADAEFQERLKEDTSFGGNLGRAVFQAKKRVLEPLGLVEEPVKTAPGKKRPVEHSPVEPDSSSGTGKAGQQPARKRLNFGQTGDADSVPDPQPLGQPPAAPSGLGTNTMATGSGAPMADNNEGADGVGNSSGNWHCDSTWMGDRVITTSTRTWALPTYNNHLYKQISSQSGASNDNHYFGYSTPWGYFDFNRFHCHFSPRDWQRLINNNWGFRPKRLNFKLFNIQVKEVTQNDGTTTIANNLTSTVQVFADSEYQLPYVLGSAHQGCLPPFPADVFMVPQYGYLTLNNGSQAVGRSSFYCLEYFPSQMLRTGNNFTFSYTFEDVPFHSSYAHSQSLDRLMNPLIDQYLYYLSRTNTPSGTTTQSRLQFSQAGASDIRDQSRNWLPGPCYRQQRVSKTSADNNNSEYSWTRATKYHLNGRDSLVNPGPAMASHKDDEEKFFPQSGVLIFGKQGSEKTNVDIEKVMITDEEEIRTTNPVATEQYGSVSTNLQRGNRQAATADVNTQGVLPGMVWQDRDVYLQGPIWAKIPHTDGHFHPSPLMGGFGLKHPPPQILIKNTPVPANPSTTFSAAKFASFITQYSTGQVSVEIEWELQKENSKRWNPEIQYTSNLCKSVNVDFTVDTNGVYSEPRPIGTRYLTRNL

SEQ ID NO: 516 - protein, 735 aa, synthetic construct
MAADGYLPDWLEDTLSEGIRQWWKLKPGPPPPKPAERHKDDSRGLVLPGYKYLGPFNGLDKGEPVNEADAAALEHDKAYDRQLDSGDNPYLKYNHADAEFQERLKEDTSFGGNLGRAVFQAKKRVLEPLGLVEEPVKTAPGKKRPVEHSPVEPDSSSGTGKAGQQPARKRLNFGQTGDADSVPDPQPLGQPPAAPSGLGTNTMATGSGAPMADNNEGADGVGNSSGNWHCDSTWMGDRVITTSTRTWALPTYNNHLYKQISSQSGASNDNHYFGYSTPWGYFDFNRFHCHFSPRDWQRLINNNWGFRPKRLNFKLFNIQVKEVTQNDGTTTIANNLTSTVQVFADSEYQLPYVLGSAHQGCLPPFPADVFMVPQYGYLTLNNGSQAVGRSSFYCLEYFPSQMLRTGNNFTFSYTFEDVPFHSSYAHSQSLDRLMNPLIDQYLYYLSRTNTPSGTTTQSRLQFSQAGASDIRDQSRNWLPGPCYRQQRVSKTSADNNNSEISWTRATKYHLNGRDSLVNPGPAMASHKDDEEKFFPQSGVLIFGKQGSEKTNVDIEKVMITDEEEIRTTNPVATEQYGSVSTNLQRGNRQAATADVNTQGVLPGMVWQDRDVYLQGPIWAKIPHTDGHFHPSPLMGGFGLKHPPPQILIKNTPVPANPSTTFSAAKFASFITQYSTGQVSVEIEWELQKENSKRWNPEIQYTSNLCKSVNVDFTVDTNGVYSEPRPIGTRYLTRNL

SEQ ID NO: 517 - protein, 736 aa, synthetic construct
MAADGYLPDWLEDNLSEGIREWWALKPGVPQPKANQQHQDNRRGLVLPGYKYLGPGNGLDKGEPVNEADAAALEHDKAYDQQLKAGDNPYLKYNHADAEFQERLQEDTSFGGNLGRAVFQAKKRILEPLGLVEEAAKTAPGKKRPVDQSPQEPDSSSGVGKSGKQPARKRLNFGQTGDSESVPDPQPLGEPPAAPTSLGSNTMASGGGAPMADNNEGADGVGNSSGNWHCDSQWLGDRVITTSTRTWALPTYNNHLYKQISSQSGASNDNHYFGYSTPWGYFDFNRFHCHFSPRDWQRLINNNWGFRPKKLSFKLFNIQVKEVTQNDGTTTIANNLTSTVQVFGDSEYQLPYVLGSAHQGCLPPFPADVFMVPQYGYLTLNNGSQAVGRSSFYCLEYFPSQMLRTGNNFQFSYTFEDVPFHSSYAHSQSLDRLMNPLIDQYLYYLNRTQGTTSGTTNQSRLLFSQAGPQSMSLQARNWLPGPCYRQQRLSKTANDNNNSNFPWTAASKYHLNGRDSLVNPGPAMASHKDDEEKFFPMHGNLIFGKEGTTASNAELDNVMITDEEEIRTTNPVATEQYGTVANNLQSSNTAPTTRTVNDQGALPGMVWQDRDVYLQGPIWAKIPHTDGHFHPSPLMGGFGLKHPPPQIMIKNTPVPANPPTTFSPAKFASFITQYSTGQVSVEIEWELQKENSKRWNPEIQYTSNYNKSVNVDFTVDTNGVYSEPRPIGTRYLTRNL

SEQ ID NO: 518 - protein, 736 aa, synthetic construct
MAADGYLPDWLEDNLSEGIREWWALKPGVPQPKANQQHQDNRRGLVLPGYKYLGPGNGLDKGEPVNEADAAALEHDKAYDQQLKAGDNPYLKYNHADAEFQERLQEDTSFGGNLGRAVFQAKKRILEPLGLVEEAAKTAPGKKRPVDQSPQEPDSSSGVGKSGKQPARKRLNFGQTGDSESVPDPQPLGEPPAAPTSLGSNTMASGGGAPMADNNEGADGVGNSSGNWHCDSQWLGDRVITTSTRTWALPTYNNHLYKQISSQSGASNDNHYFGYSTPWGYFDFNRFHCHFSPRDWQRLINNNWGFRPKKLSFKLFNIQVKEVTQNDGTTTIANNLTSTVQVFGDSEYQLPYVLGSAHQGCLPPFPADVFMVPQYGYLTLNNGSQAVGRSSFYCLEYFPSQMLRTGNNFQFSYTFEDVPFHSSYAHSQSLDRLMNPLIDQYLYYLNRTQGTTSGTTNQSRLLFSQAGPQSMSLQARNWLPGPCYRQQRLSKTANDNNNSNIPWTAASKYHLNGRDSLVNPGPAMASHKDDEEKFFPMHGNLIFGKEGTTASNAELDNVMITDEEEIRTTNPVATEQYGTVANNLQSSNTAPTTRTVNDQGALPGMVWQDRDVYLQGPIWAKIPHTDGHFHPSPLMGGFGLKHPPPQIMIKNTPVPANPPTTFSPAKFASFITQYSTGQVSVEIEWELQKENSKRWNPEIQYTSNYNKSVNVDFTVDTNGVYSEPRPIGTRYLTRNL

SEQ ID NO: 519 - protein, 736 aa, synthetic construct
MAADGYLPDWLEDNLSEGIREWWALKPGVPQPKANQQHQDNRRGLVLPGYKYLGPGNGLDKGEPVNEADAAALEHDKAYDQQLKAGDNPYLKYNHADAEFQERLQEDTSFGGNLGRAVFQAKKRILEPLGLVEEAAKTAPGKKRPVDQSPQEPDSSSGVGKSGKQPARKRLNFGQTGDSESVPDPQPLGEPPAAPTSLGSNTMASGGGAPMADNNEGADGVGNSSGNWHCDSQWLGDRVITTSTRTWALPTYNNHLYKQISSQSGASNDNHYFGYSTPWGYFDFNRFHCHFSPRDWQRLINNNWGFRPKKLSFKLFNIQVKEVTQNDGTTTIANNLTSTVQVFGDSEYQLPYVLGSAHQGCLPPFPADVFMVPQYGYLTLNNGSQAVGRSSFYCLEYFPSQMLRTGNNFQFSYTFEDVPFHSSYAHSQSLDRLMNPLIDQYLYYLNRTQGTTSGTTNQSRLLFSQAGPQSMSLQARNWLPGPCYRQQRLSKTANDNNNSNFPWTRASKYHLNGRDSLVNPGPAMASHKDDEEKFFPMHGNLIFGKEGTTASNAELDNVMITDEEEIRTTNPVATEQYGTVANNLQSSNTAPTTRTVNDQGALPGMVWQDRDVYLQGPIWAKIPHTDGHFHPSPLMGGFGLKHPPPQIMIKNTPVPANPPTTFSPAKFASFITQYSTGQVSVEIEWELQKENSKRWNPEIQYTSNYNKSVNVDFTVDTNGVYSEPRPIGTRYLTRNL

SEQ ID NO: 520 - protein, 736 aa, synthetic construct
MAADGYLPDWLEDNLSEGIREWWALKPGVPQPKANQQHQDNRRGLVLPGYKYLGPGNGLDKGEPVNEADAAALEHDKAYDQQLKAGDNPYLKYNHADAEFQERLQEDTSFGGNLGRAVFQAKKRILEPLGLVEEAAKTAPGKKRPVDQSPQEPDSSSGVGKSGKQPARKRLNFGQTGDSESVPDPQPLGEPPAAPTSLGSNTMASGGGAPMADNNEGADGVGNSSGNWHCDSQWLGDRVITTSTRTWALPTYNNHLYKQISSQSGASNDNHYFGYSTPWGYFDFNRFHCHFSPRDWQRLINNNWGFRPKKLSFKLFNIQVKEVTQNDGTTTIANNLTSTVQVFGDSEYQLPYVLGSAHQGCLPPFPADVFMVPQYGYLTLNNGSQAVGRSSFYCLEYFPSQMLRTGNNFQFSYTFEDVPFHSSYAHSQSLDRLMNPLIDQYLYYLNRTQGTTSGTTNQSRLLFSQAGPQSMSLQARNWLPGPCYRQQRLSKTANDNNNSNFPWTAASKYHLNGRDSLVNPGPAMASHKDDEEKFFPMHGNLIFGKEGTTASNAELDNVMITDEEEIRTTNPVATEQYGTVANNLQSSNTAPTTRTVNDQGALPGMVWQDRDVYLQGPIWAKIPHTDGHFHPSPLMGGFGLKHPPPQIMIKNTPVPANPPTTFSPAKFASFITQYSTGQVSVEIEWELQKENSKRWNPEIQYTSNYCKSVNVDFTVDTNGVYSEPRPIGTRYLTRNL

SEQ ID NO: 521 - protein, 736 aa, synthetic construct
MAADGYLPDWLEDNLSEGIREWWALKPGVPQPKANQQHQDNRRGLVLPGYKYLGPGNGLDKGEPVNEADAAALEHDKAYDQQLKAGDNPYLKYNHADAEFQERLQEDTSFGGNLGRAVFQAKKRILEPLGLVEEAAKTAPGKKRPVDQSPQEPDSSSGVGKSGKQPARKRLNFGQTGDSESVPDPQPLGEPPAAPTSLGSNTMASGGGAPMADNNEGADGVGNSSGNWHCDSQWLGDRVITTSTRTWALPTYNNHLYKQISSQSGASNDNHYFGYSTPWGYFDFNRFHCHFSPRDWQRLINNNWGFRPKKLSFKLFNIQVKEVTQNDGTTTIANNLTSTVQVFGDSEYQLPYVLGSAHQGCLPPFPADVFMVPQYGYLTLNNGSQAVGRSSFYCLEYFPSQMLRTGNNFQFSYTFEDVPFHSSYAHSQSLDRLMNPLIDQYLYYLNRTQGTTSGTTNQSRLLFSQAGPQSMSLQARNWLPGPCYRQQRLSKTANDNNNSNIPWTRASKYHLNGRDSLVNPGPAMASHKDDEEKFFPMHGNLIFGKEGTTASNAELDNVMITDEEEIRTTNPVATEQYGTVANNLQSSNTAPTTRTVNDQGALPGMVWQDRDVYLQGPIWAKIPHTDGHFHPSPLMGGFGLKHPPPQIMIKNTPVPANPPTTFSPAKFASFITQYSTGQVSVEIEWELQKENSKRWNPEIQYTSNYNKSVNVDFTVDTNGVYSEPRPIGTRYLTRNL

SEQ ID NO: 522 - protein, 736 aa, synthetic construct
MAADGYLPDWLEDNLSEGIREWWALKPGVPQPKANQQHQDNRRGLVLPGYKYLGPGNGLDKGEPVNEADAAALEHDKAYDQQLKAGDNPYLKYNHADAEFQERLQEDTSFGGNLGRAVFQAKKRILEPLGLVEEAAKTAPGKKRPVDQSPQEPDSSSGVGKSGKQPARKRLNFGQTGDSESVPDPQPLGEPPAAPTSLGSNTMASGGGAPMADNNEGADGVGNSSGNWHCDSQWLGDRVITTSTRTWALPTYNNHLYKQISSQSGASNDNHYFGYSTPWGYFDFNRFHCHFSPRDWQRLINNNWGFRPKKLSFKLFNIQVKEVTQNDGTTTIANNLTSTVQVFGDSEYQLPYVLGSAHQGCLPPFPADVFMVPQYGYLTLNNGSQAVGRSSFYCLEYFPSQMLRTGNNFQFSYTFEDVPFHSSYAHSQSLDRLMNPLIDQYLYYLNRTQGTTSGTTNQSRLLFSQAGPQSMSLQARNWLPGPCYRQQRLSKTANDNNNSNIPWTAASKYHLNGRDSLVNPGPAMASHKDDEEKFFPMHGNLIFGKEGTTASNAELDNVMITDEEEIRTTNPVATEQYGTVANNLQSSNTAPTTRTVNDQGALPGMVWQDRDVYLQGPIWAKIPHTDGHFHPSPLMGGFGLKHPPPQIMIKNTPVPANPPTTFSPAKFASFITQYSTGQVSVEIEWELQKENSKRWNPEIQYTSNYCKSVNVDFTVDTNGVYSEPRPIGTRYLTRNL

SEQ ID NO: 523 - protein, 736 aa, synthetic construct
MAADGYLPDWLEDNLSEGIREWWALKPGVPQPKANQQHQDNRRGLVLPGYKYLGPGNGLDKGEPVNEADAAALEHDKAYDQQLKAGDNPYLKYNHADAEFQERLQEDTSFGGNLGRAVFQAKKRILEPLGLVEEAAKTAPGKKRPVDQSPQEPDSSSGVGKSGKQPARKRLNFGQTGDSESVPDPQPLGEPPAAPTSLGSNTMASGGGAPMADNNEGADGVGNSSGNWHCDSQWLGDRVITTSTRTWALPTYNNHLYKQISSQSGASNDNHYFGYSTPWGYFDFNRFHCHFSPRDWQRLINNNWGFRPKKLSFKLFNIQVKEVTQNDGTTTIANNLTSTVQVFGDSEYQLPYVLGSAHQGCLPPFPADVFMVPQYGYLTLNNGSQAVGRSSFYCLEYFPSQMLRTGNNFQFSYTFEDVPFHSSYAHSQSLDRLMNPLIDQYLYYLNRTQGTTSGTTNQSRLLFSQAGPQSMSLQARNWLPGPCYRQQRLSKTANDNNNSNFPWTRASKYHLNGRDSLVNPGPAMASHKDDEEKFFPMHGNLIFGKEGTTASNAELDNVMITDEEEIRTTNPVATEQYGTVANNLQSSNTAPTTRTVNDQGALPGMVWQDRDVYLQGPIWAKIPHTDGHFHPSPLMGGFGLKHPPPQIMIKNTPVPANPPTTFSPAKFASFITQYSTGQVSVEIEWELQKENSKRWNPEIQYTSNYCKSVNVDFTVDTNGVYSEPRPIGTRYLTRNL

SEQ ID NO: 524 - protein, 736 aa, synthetic construct
MAADGYLPDWLEDNLSEGIREWWALKPGVPQPKANQQHQDNRRGLVLPGYKYLGPGNGLDKGEPVNEADAAALEHDKAYDQQLKAGDNPYLKYNHADAEFQERLQEDTSFGGNLGRAVFQAKKRILEPLGLVEEAAKTAPGKKRPVDQSPQEPDSSSGVGKSGKQPARKRLNFGQTGDSESVPDPQPLGEPPAAPTSLGSNTMASGGGAPMADNNEGADGVGNSSGNWHCDSQWLGDRVITTSTRTWALPTYNNHLYKQISSQSGASNDNHYFGYSTPWGYFDFNRFHCHFSPRDWQRLINNNWGFRPKKLSFKLFNIQVKEVTQNDGTTTIANNLTSTVQVFGDSEYQLPYVLGSAHQGCLPPFPADVFMVPQYGYLTLNNGSQAVGRSSFYCLEYFPSQMLRTGNNFQFSYTFEDVPFHSSYAHSQSLDRLMNPLIDQYLYYLNRTQGTTSGTTNQSRLLFSQAGPQSMSLQARNWLPGPCYRQQRLSKTANDNNNSNIPWTRASKYHLNGRDSLVNPGPAMASHKDDEEKFFPMHGNLIFGKEGTTASNAELDNVMITDEEEIRTTNPVATEQYGTVANNLQSSNTAPTTRTVNDQGALPGMVWQDRDVYLQGPIWAKIPHTDGHFHPSPLMGGFGLKHPPPQIMIKNTPVPANPPTTFSPAKFASFITQYSTGQVSVEIEWELQKENSKRWNPEIQYTSNYCKSVNVDFTVDTNGVYSEPRPIGTRYLTRNL

SEQ ID NO: 525 - protein, 736 aa, synthetic construct
MAADGYLPDWLEDNLSEGIREWWALKPGVPQPKANQQHQDNRRGLVLPGYKYLGPGNGLDKGEPVNEADAAALEHDKAYDQQLKAGDNPYLKYNHADAEFQERLQEDTSFGGNLGRAVFQAKKRILEPLGLVEEAAKTAPGKKRPVDQSPQEPDSSSGVGKSGKQPARKRLNFGQTGDSESVPDPQPLGEPPAAPTSLGSNTMASGGGAPMADNNEGADGVGNSSGNWHCDSQWLGDRVITTSTRTWALPTYNNHLYKQISSQSGASNDNHYFGYSTPWGYFDFNRFHCHFSPRDWQRLINNNWGFRPKKLSFKLFNIQVKEVTQNDGTTTIANNLTSTVQVFTDSEYQLPYVLGSAHQGCLPPFPADVFMVPQYGYLTLNNGSQAVGRSSFYCLEYFPSQMLRTGNNFQFSYTFEDVPFHSSYAHSQSLDRLMNPLIDQYLYYLNRTQGTTSGTTNQSRLLFSQAGPQSMSLQARNWLPGPCYRQQRLSKTANDNNNSNFPWTAASKYHLNGRDSLVNPGPAMASHKDDEEKFFPMHGNLIFGKEGTTASNAELDNVMITDEEEIRTTNPVATEQYGTVANNLQSSNTAPTTRTVNDQGALPGMVWQDRDVYLQGPIWAKIPHTDGHFHPSPLMGGFGLKHPPPQIMIKNTPVPANPPTTFSPAKFASFITQYSTGQVSVEIEWELQKENSKRWNPEIQYTSNLNKSVNVDFTVDTNGVYSEPRPIGTRYLTRNL

SEQ ID NO: 526 - protein, 736 aa, synthetic construct
MAADGYLPDWLEDNLSEGIREWWALKPGVPQPKANQQHQDNRRGLVLPGYKYLGPGNGLDKGEPVNEADAAALEHDKAYDQQLKAGDNPYLKYNHADAEFQERLQEDTSFGGNLGRAVFQAKKRILEPLGLVEEAAKTAPGKKRPVDQSPQEPDSSSGVGKSGKQPARKRLNFGQTGDSESVPDPQPLGEPPAAPTSLGSNTMASGGGAPMADNNEGADGVGNSSGNWHCDSQWLGDRVITTSTRTWALPTYNNHLYKQISSQSGASNDNHYFGYSTPWGYFDFNRFHCHFSPRDWQRLINNNWGFRPKKLSFKLFNIQVKEVTQNDGTTTIANNLTSTVQVFTDSEYQLPYVLGSAHQGCLPPFPADVFMVPQYGYLTLNNGSQAVGRSSFYCLEYFPSQMLRTGNNFQFSYTFEDVPFHSSYAHSQSLDRLMNPLIDQYLYYLNRTQGTTSGTTNQSRLLFSQAGPQSMSLQARNWLPGPCYRQQRLSKTANDNNNSNIPWTAASKYHLNGRDSLVNPGPAMASHKDDEEKFFPMHGNLIFGKEGTTASNAELDNVMITDEEEIRTTNPVATEQYGTVANNLQSSNTAPTTRTVNDQGALPGMVWQDRDVYLQGPIWAKIPHTDGHFHPSPLMGGFGLKHPPPQIMIKNTPVPANPPTTFSPAKFASFITQYSTGQVSVEIEWELQKENSKRWNPEIQYTSNLNKSVNVDFTVDTNGVYSEPRPIGTRYLTRNL

SEQ ID NO: 527 - protein, 736 aa, synthetic construct
MAADGYLPDWLEDNLSEGIREWWALKPGVPQPKANQQHQDNRRGLVLPGYKYLGPGNGLDKGEPVNEADAAALEHDKAYDQQLKAGDNPYLKYNHADAEFQERLQEDTSFGGNLGRAVFQAKKRILEPLGLVEEAAKTAPGKKRPVDQSPQEPDSSSGVGKSGKQPARKRLNFGQTGDSESVPDPQPLGEPPAAPTSLGSNTMASGGGAPMADNNEGADGVGNSSGNWHCDSQWLGDRVITTSTRTWALPTYNNHLYKQISSQSGASNDNHYFGYSTPWGYFDFNRFHCHFSPRDWQRLINNNWGFRPKKLSFKLFNIQVKEVTQNDGTTTIANNLTSTVQVFTDSEYQLPYVLGSAHQGCLPPFPADVFMVPQYGYLTLNNGSQAVGRSSFYCLEYFPSQMLRTGNNFQFSYTFEDVPFHSSYAHSQSLDRLMNPLIDQYLYYLNRTQGTTSGTTNQSRLLFSQAGPQSMSLQARNWLPGPCYRQQRLSKTANDNNNSNFPWTRASKYHLNGRDSLVNPGPAMASHKDDEEKFFPMHGNLIFGKEGTTASNAELDNVMITDEEEIRTTNPVATEQYGTVANNLQSSNTAPTTRTVNDQGALPGMVWQDRDVYLQGPIWAKIPHTDGHFHPSPLMGGFGLKHPPPQIMIKNTPVPANPPTTFSPAKFASFITQYSTGQVSVEIEWELQKENSKRWNPEIQYTSNLNKSVNVDFTVDTNGVYSEPRPIGTRYLTRNL

SEQ ID NO: 528 - protein, 736 aa, synthetic construct
MAADGYLPDWLEDNLSEGIREWWALKPGVPQPKANQQHQDNRRGLVLPGYKYLGPGNGLDKGEPVNEADAAALEHDKAYDQQLKAGDNPYLKYNHADAEFQERLQEDTSFGGNLGRAVFQAKKRILEPLGLVEEAAKTAPGKKRPVDQSPQEPDSSSGVGKSGKQPARKRLNFGQTGDSESVPDPQPLGEPPAAPTSLGSNTMASGGGAPMADNNEGADGVGNSSGNWHCDSQWLGDRVITTSTRTWALPTYNNHLYKQISSQSGASNDNHYFGYSTPWGYFDFNRFHCHFSPRDWQRLINNNWGFRPKKLSFKLFNIQVKEVTQNDGTTTIANNLTSTVQVFTDSEYQLPYVLGSAHQGCLPPFPADVFMVPQYGYLTLNNGSQAVGRSSFYCLEYFPSQMLRTGNNFQFSYTFEDVPFHSSYAHSQSLDRLMNPLIDQYLYYLNRTQGTTSGTTNQSRLLFSQAGPQSMSLQARNWLPGPCYRQQRLSKTANDNNNSNFPWTAASKYHLNGRDSLVNPGPAMASHKDDEEKFFPMHGNLIFGKEGTTASNAELDNVMITDEEEIRTTNPVATEQYGTVANNLQSSNTAPTTRTVNDQGALPGMVWQDRDVYLQGPIWAKIPHTDGHFHPSPLMGGFGLKHPPPQIMIKNTPVPANPPTTFSPAKFASFITQYSTGQVSVEIEWELQKENSKRWNPEIQYTSNLCKSVNVDFTVDTNGVYSEPRPIGTRYLTRNL

SEQ ID NO: 529 - protein, 736 aa, synthetic construct
MAADGYLPDWLEDNLSEGIREWWALKPGVPQPKANQQHQDNRRGLVLPGYKYLGPGNGLDKGEPVNEADAAALEHDKAYDQQLKAGDNPYLKYNHADAEFQERLQEDTSFGGNLGRAVFQAKKRILEPLGLVEEAAKTAPGKKRPVDQSPQEPDSSSGVGKSGKQPARKRLNFGQTGDSESVPDPQPLGEPPAAPTSLGSNTMASGGGAPMADNNEGADGVGNSSGNWHCDSQWLGDRVITTSTRTWALPTYNNHLYKQISSQSGASNDNHYFGYSTPWGYFDFNRFHCHFSPRDWQRLINNNWGFRPKKLSFKLFNIQVKEVTQNDGTTTIANNLTSTVQVFTDSEYQLPYVLGSAHQGCLPPFPADVFMVPQYGYLTLNNGSQAVGRSSFYCLEYFPSQMLRTGNNFQFSYTFEDVPFHSSYAHSQSLDRLMNPLIDQYLYYLNRTQGTTSGTTNQSRLLFSQAGPQSMSLQARNWLPGPCYRQQRLSKTANDNNNSNIPWTRASKYHLNGRDSLVNPGPAMASHKDDEEKFFPMHGNLIFGKEGTTASNAELDNVMITDEEEIRTTNPVATEQYGTVANNLQSSNTAPTTRTVNDQGALPGMVWQDRDVYLQGPIWAKIPHTDGHFHPSPLMGGFGLKHPPPQIMIKNTPVPANPPTTFSPAKFASFITQYSTGQVSVEIEWELQKENSKRWNPEIQYTSNLNKSVNVDFTVDTNGVYSEPRPIGTRYLTRNL

SEQ ID NO: 530 - protein, 736 aa, synthetic construct
MAADGYLPDWLEDNLSEGIREWWALKPGVPQPKANQQHQDNRRGLVLPGYKYLGPGNGLDKGEPVNEADAAALEHDKAYDQQLKAGDNPYLKYNHADAEFQERLQEDTSFGGNLGRAVFQAKKRILEPLGLVEEAAKTAPGKKRPVDQSPQEPDSSSGVGKSGKQPARKRLNFGQTGDSESVPDPQPLGEPPAAPTSLGSNTMASGGGAPMADNNEGADGVGNSSGNWHCDSQWLGDRVITTSTRTWALPTYNNHLYKQISSQSGASNDNHYFGYSTPWGYFDFNRFHCHFSPRDWQRLINNNWGFRPKKLSFKLFNIQVKEVTQNDGTTTIANNLTSTVQVFTDSEYQLPYVLGSAHQGCLPPFPADVFMVPQYGYLTLNNGSQAVGRSSFYCLEYFPSQMLRTGNNFQFSYTFEDVPFHSSYAHSQSLDRLMNPLIDQYLYYLNRTQGTTSGTTNQSRLLFSQAGPQSMSLQARNWLPGPCYRQQRLSKTANDNNNSNIPWTAASKYHLNGRDSLVNPGPAMASHKDDEEKFFPMHGNLIFGKEGTTASNAELDNVMITDEEEIRTTNPVATEQYGTVANNLQSSNTAPTTRTVNDQGALPGMVWQDRDVYLQGPIWAKIPHTDGHFHPSPLMGGFGLKHPPPQIMIKNTPVPANPPTTFSPAKFASFITQYSTGQVSVEIEWELQKENSKRWNPEIQYTSNLCKSVNVDFTVDTNGVYSEPRPIGTRYLTRNL

SEQ ID NO: 531 - protein, 736 aa, synthetic construct
MAADGYLPDWLEDNLSEGIREWWALKPGVPQPKANQQHQDNRRGLVLPGYKYLGPGNGLDKGEPVNEADAAALEHDKAYDQQLKAGDNPYLKYNHADAEFQERLQEDTSFGGNLGRAVFQAKKRILEPLGLVEEAAKTAPGKKRPVDQSPQEPDSSSGVGKSGKQPARKRLNFGQTGDSESVPDPQPLGEPPAAPTSLGSNTMASGGGAPMADNNEGADGVGNSSGNWHCDSQWLGDRVITTSTRTWALPTYNNHLYKQISSQSGASNDNHYFGYSTPWGYFDFNRFHCHFSPRDWQRLINNNWGFRPKKLSFKLFNIQVKEVTQNDGTTTIANNLTSTVQVFTDSEYQLPYVLGSAHQGCLPPFPADVFMVPQYGYLTLNNGSQAVGRSSFYCLEYFPSQMLRTGNNFQFSYTFEDVPFHSSYAHSQSLDRLMNPLIDQYLYYLNRTQGTTSGTTNQSRLLFSQAGPQSMSLQARNWLPGPCYRQQRLSKTANDNNNSNFPWTRASKYHLNGRDSLVNPGPAMASHKDDEEKFFPMHGNLIFGKEGTTASNAELDNVMITDEEEIRTTNPVATEQYGTVANNLQSSNTAPTTRTVNDQGALPGMVWQDRDVYLQGPIWAKIPHTDGHFHPSPLMGGFGLKHPPPQIMIKNTPVPANPPTTFSPAKFASFITQYSTGQVSVEIEWELQKENSKRWNPEIQYTSNLCKSVNVDFTVDTNGVYSEPRPIGTRYLTRNL

SEQ ID NO: 532 - protein, 736 aa, synthetic construct
MAADGYLPDWLEDNLSEGIREWWALKPGVPQPKANQQHQDNRRGLVLPGYKYLGPGNGLDKGEPVNEADAAALEHDKAYDQQLKAGDNPYLKYNHADAEFQERLQEDTSFGGNLGRAVFQAKKRILEPLGLVEEAAKTAPGKKRPVDQSPQEPDSSSGVGKSGKQPARKRLNFGQTGDSESVPDPQPLGEPPAAPTSLGSNTMASGGGAPMADNNEGADGVGNSSGNWHCDSQWLGDRVITTSTRTWALPTYNNHLYKQISSQSGASNDNHYFGYSTPWGYFDFNRFHCHFSPRDWQRLINNNWGFRPKKLSFKLFNIQVKEVTQNDGTTTIANNLTSTVQVFTDSEYQLPYVLGSAHQGCLPPFPADVFMVPQYGYLTLNNGSQAVGRSSFYCLEYFPSQMLRTGNNFQFSYTFEDVPFHSSYAHSQSLDRLMNPLIDQYLYYLNRTQGTTSGTTNQSRLLFSQAGPQSMSLQARNWLPGPCYRQQRLSKTANDNNNSNIPWTRASKYHLNGRDSLVNPGPAMASHKDDEEKFFPMHGNLIFGKEGTTASNAELDNVMITDEEEIRTTNPVATEQYGTVANNLQSSNTAPTTRTVNDQGALPGMVWQDRDVYLQGPIWAKIPHTDGHFHPSPLMGGFGLKHPPPQIMIKNTPVPANPPTTFSPAKFASFITQYSTGQVSVEIEWELQKENSKRWNPEIQYTSNLCKSVNVDFTVDTNGVYSEPRPIGTRYLTRNL

SEQ ID NO: 533 - protein, 736 aa, synthetic construct
MAADGYLPDWLEDNLSEGIREWWALKPGVPQPKANQQHQDNRRGLVLPGYKYLGPGNGLDKGEPVNEADAAALEHDKAYDQQLKAGDNPYLKYNHADAEFQERLQEDTSFGGNLGRAVFQAKKRILEPLGLVEEAAKTAPGKKRPVDQSPQEPDSSSGVGKSGKQPARKRLNFGQTGDSESVPDPQPLGEPPAAPTSLGSNTMASGGGAPMADNNEGADGVGNSSGNWHCDSQWLGDRVITTSTRTWALPTYNNHLYKQISSQSGASNDNHYFGYSTPWGYFDFNRFHCHFSPRDWQRLINNNWGFRPKKLSFKLFNIQVKEVTQNDGTTTIANNLTSTVQVFGDSEYQLPYVLGSAHQGCLPPFPADVFMVPQYGYLTLNNGSQAVGRSSFYCLEYFPSQMLRTGNNFQFSYTFEDVPFHSSYAHSQSLDRLMNPLIDQYLYYLNRTQGTTSGTTNQSRLLFSQAGPQSMSLQARNWLPGPCYRQQRLSKTANDNNNSNFPWTAASKYHLNGRDSLVNPGPAMASHKDDEEKFFPMHGNLIFGKEGTTASNAELDNVMITDEEEIRTTNPVATEQYGTVANNLQSSNTAPTTRTVNDQGALPGMVWQDRDVYLQGPIWAKIPHTDGHFHPSPLMGGFGLKHPPPQIMIKNTPVPANPPTTFSPAKFASFITQYSTGQVSVEIEWELQKENSKRWNPEIQYTSNLNKSVNVDFTVDTNGVYSEPRPIGTRYLTRNL

SEQ ID NO: 534 - protein, 736 aa, synthetic construct
MAADGYLPDWLEDNLSEGIREWWALKPGVPQPKANQQHQDNRRGLVLPGYKYLGPGNGLDKGEPVNEADAAALEHDKAYDQQLKAGDNPYLKYNHADAEFQERLQEDTSFGGNLGRAVFQAKKRILEPLGLVEEAAKTAPGKKRPVDQSPQEPDSSSGVGKSGKQPARKRLNFGQTGDSESVPDPQPLGEPPAAPTSLGSNTMASGGGAPMADNNEGADGVGNSSGNWHCDSQWLGDRVITTSTRTWALPTYNNHLYKQISSQSGASNDNHYFGYSTPWGYFDFNRFHCHFSPRDWQRLINNNWGFRPKKLSFKLFNIQVKEVTQNDGTTTIANNLTSTVQVFGDSEYQLPYVLGSAHQGCLPPFPADVFMVPQYGYLTLNNGSQAVGRSSFYCLEYFPSQMLRTGNNFQFSYTFEDVPFHSSYAHSQSLDRLMNPLIDQYLYYLNRTQGTTSGTTNQSRLLFSQAGPQSMSLQARNWLPGPCYRQQRLSKTANDNNNSNIPWTAASKYHLNGRDSLVNPGPAMASHKDDEEKFFPMHGNLIFGKEGTTASNAELDNVMITDEEEIRTTNPVATEQYGTVANNLQSSNTAPTTRTVNDQGALPGMVWQDRDVYLQGPIWAKIPHTDGHFHPSPLMGGFGLKHPPPQIMIKNTPVPANPPTTFSPAKFASFITQYSTGQVSVEIEWELQKENSKRWNPEIQYTSNLNKSVNVDFTVDTNGVYSEPRPIGTRYLTRNL

SEQ ID NO: 535 - protein, 736 aa, synthetic construct
MAADGYLPDWLEDNLSEGIREWWALKPGVPQPKANQQHQDNRRGLVLPGYKYLGPGNGLDKGEPVNEADAAALEHDKAYDQQLKAGDNPYLKYNHADAEFQERLQEDTSFGGNLGRAVFQAKKRILEPLGLVEEAAKTAPGKKRPVDQSPQEPDSSSGVGKSGKQPARKRLNFGQTGDSESVPDPQPLGEPPAAPTSLGSNTMASGGGAPMADNNEGADGVGNSSGNWHCDSQWLGDRVITTSTRTWALPTYNNHLYKQISSQSGASNDNHYFGYSTPWGYFDFNRFHCHFSPRDWQRLINNNWGFRPKKLSFKLFNIQVKEVTQNDGTTTIANNLTSTVQVFGDSEYQLPYVLGSAHQGCLPPFPADVFMVPQYGYLTLNNGSQAVGRSSFYCLEYFPSQMLRTGNNFQFSYTFEDVPFHSSYAHSQSLDRLMNPLIDQYLYYLNRTQGTTSGTTNQSRLLFSQAGPQSMSLQARNWLPGPCYRQQRLSKTANDNNNSNFPWTRASKYHLNGRDSLVNPGPAMASHKDDEEKFFPMHGNLIFGKEGTTASNAELDNVMITDEEEIRTTNPVATEQYGTVANNLQSSNTAPTTRTVNDQGALPGMVWQDRDVYLQGPIWAKIPHTDGHFHPSPLMGGFGLKHPPPQIMIKNTPVPANPPTTFSPAKFASFITQYSTGQVSVEIEWELQKENSKRWNPEIQYTSNLNKSVNVDFTVDTNGVYSEPRPIGTRYLTRNL

SEQ ID NO: 536 - protein, 736 aa, synthetic construct
MAADGYLPDWLEDNLSEGIREWWALKPGVPQPKANQQHQDNRRGLVLPGYKYLGPGNGLDKGEPVNEADAAALEHDKAYDQQLKAGDNPYLKYNHADAEFQERLQEDTSFGGNLGRAVFQAKKRILEPLGLVEEAAKTAPGKKRPVDQSPQEPDSSSGVGKSGKQPARKRLNFGQTGDSESVPDPQPLGEPPAAPTSLGSNTMASGGGAPMADNNEGADGVGNSSGNWHCDSQWLGDRVITTSTRTWALPTYNNHLYKQISSQSGASNDNHYFGYSTPWGYFDFNRFHCHFSPRDWQRLINNNWGFRPKKLSFKLFNIQVKEVTQNDGTTTIANNLTSTVQVFGDSEYQLPYVLGSAHQGCLPPFPADVFMVPQYGYLTLNNGSQAVGRSSFYCLEYFPSQMLRTGNNFQFSYTFEDVPFHSSYAHSQSLDRLMNPLIDQYLYYLNRTQGTTSGTTNQSRLLFSQAGPQSMSLQARNWLPGPCYRQQRLSKTANDNNNSNFPWTAASKYHLNGRDSLVNPGPAMASHKDDEEKFFPMHGNLIFGKEGTTASNAELDNVMITDEEEIRTTNPVATEQYGTVANNLQSSNTAPTTRTVNDQGALPGMVWQDRDVYLQGPIWAKIPHTDGHFHPSPLMGGFGLKHPPPQIMIKNTPVPANPPTTFSPAKFASFITQYSTGQVSVEIEWELQKENSKRWNPEIQYTSNLCKSVNVDFTVDTNGVYSEPRPIGTRYLTRNL

SEQ ID NO: 537 - protein, 736 aa, synthetic construct
MAADGYLPDWLEDNLSEGIREWWALKPGVPQPKANQQHQDNRRGLVLPGYKYLGPGNGLDKGEPVNEADAAALEHDKAYDQQLKAGDNPYLKYNHADAEFQERLQEDTSFGGNLGRAVFQAKKRILEPLGLVEEAAKTAPGKKRPVDQSPQEPDSSSGVGKSGKQPARKRLNFGQTGDSESVPDPQPLGEPPAAPTSLGSNTMASGGGAPMADNNEGADGVGNSSGNWHCDSQWLGDRVITTSTRTWALPTYNNHLYKQISSQSGASNDNHYFGYSTPWGYFDFNRFHCHFSPRDWQRLINNNWGFRPKKLSFKLFNIQVKEVTQNDGTTTIANNLTSTVQVFGDSEYQLPYVLGSAHQGCLPPFPADVFMVPQYGYLTLNNGSQAVGRSSFYCLEYFPSQMLRTGNNFQFSYTFEDVPFHSSYAHSQSLDRLMNPLIDQYLYYLNRTQGTTSGTTNQSRLLFSQAGPQSMSLQARNWLPGPCYRQQRLSKTANDNNNSNIPWTRASKYHLNGRDSLVNPGPAMASHKDDEEKFFPMHGNLIFGKEGTTASNAELDNVMITDEEEIRTTNPVATEQYGTVANNLQSSNTAPTTRTVNDQGALPGMVWQDRDVYLQGPIWAKIPHTDGHFHPSPLMGGFGLKHPPPQIMIKNTPVPANPPTTFSPAKFASFITQYSTGQVSVEIEWELQKENSKRWNPEIQYTSNLNKSVNVDFTVDTNGVYSEPRPIGTRYLTRNL

SEQ ID NO: 538 - protein, 736 aa, synthetic construct
MAADGYLPDWLEDNLSEGIREWWALKPGVPQPKANQQHQDNRRGLVLPGYKYLGPGNGLDKGEPVNEADAAALEHDKAYDQQLKAGDNPYLKYNHADAEFQERLQEDTSFGGNLGRAVFQAKKRILEPLGLVEEAAKTAPGKKRPVDQSPQEPDSSSGVGKSGKQPARKRLNFGQTGDSESVPDPQPLGEPPAAPTSLGSNTMASGGGAPMADNNEGADGVGNSSGNWHCDSQWLGDRVITTSTRTWALPTYNNHLYKQISSQSGASNDNHYFGYSTPWGYFDFNRFHCHFSPRDWQRLINNNWGFRPKKLSFKLFNIQVKEVTQNDGTTTIANNLTSTVQVFGDSEYQLPYVLGSAHQGCLPPFPADVFMVPQYGYLTLNNGSQAVGRSSFYCLEYFPSQMLRTGNNFQFSYTFEDVPFHSSYAHSQSLDRLMNPLIDQYLYYLNRTQGTTSGTTNQSRLLFSQAGPQSMSLQARNWLPGPCYRQQRLSKTANDNNNSNIPWTAASKYHLNGRDSLVNPGPAMASHKDDEEKFFPMHGNLIFGKEGTTASNAELDNVMITDEEEIRTTNPVATEQYGTVANNLQSSNTAPTTRTVNDQGALPGMVWQDRDVYLQGPIWAKIPHTDGHFHPSPLMGGFGLKHPPPQIMIKNTPVPANPPTTFSPAKFASFITQYSTGQVSVEIEWELQKENSKRWNPEIQYTSNLCKSVNVDFTVDTNGVYSEPRPIGTRYLTRNL

SEQ ID NO: 539 - protein, 736 aa, synthetic construct
MAADGYLPDWLEDNLSEGIREWWALKPGVPQPKANQQHQDNRRGLVLPGYKYLGPGNGLDKGEPVNEADAAALEHDKAYDQQLKAGDNPYLKYNHADAEFQERLQEDTSFGGNLGRAVFQAKKRILEPLGLVEEAAKTAPGKKRPVDQSPQEPDSSSGVGKSGKQPARKRLNFGQTGDSESVPDPQPLGEPPAAPTSLGSNTMASGGGAPMADNNEGADGVGNSSGNWHCDSQWLGDRVITTSTRTWALPTYNNHLYKQISSQSGASNDNHYFGYSTPWGYFDFNRFHCHFSPRDWQRLINNNWGFRPKKLSFKLFNIQVKEVTQNDGTTTIANNLTSTVQVFGDSEYQLPYVLGSAHQGCLPPFPADVFMVPQYGYLTLNNGSQAVGRSSFYCLEYFPSQMLRTGNNFQFSYTFEDVPFHSSYAHSQSLDRLMNPLIDQYLYYLNRTQGTTSGTTNQSRLLFSQAGPQSMSLQARNWLPGPCYRQQRLSKTANDNNNSNFPWTRASKYHLNGRDSLVNPGPAMASHKDDEEKFFPMHGNLIFGKEGTTASNAELDNVMITDEEEIRTTNPVATEQYGTVANNLQSSNTAPTTRTVNDQGALPGMVWQDRDVYLQGPIWAKIPHTDGHFHPSPLMGGFGLKHPPPQIMIKNTPVPANPPTTFSPAKFASFITQYSTGQVSVEIEWELQKENSKRWNPEIQYTSNLCKSVNVDFTVDTNGVYSEPRPIGTRYLTRNL

SEQ ID NO: 540 - protein, 736 aa, synthetic construct
MAADGYLPDWLEDNLSEGIREWWALKPGVPQPKANQQHQDNRRGLVLPGYKYLGPGNGLDKGEPVNEADAAALEHDKAYDQQLKAGDNPYLKYNHADAEFQERLQEDTSFGGNLGRAVFQAKKRILEPLGLVEEAAKTAPGKKRPVDQSPQEPDSSSGVGKSGKQPARKRLNFGQTGDSESVPDPQPLGEPPAAPTSLGSNTMASGGGAPMADNNEGADGVGNSSGNWHCDSQWLGDRVITTSTRTWALPTYNNHLYKQISSQSGASNDNHYFGYSTPWGYFDFNRFHCHFSPRDWQRLINNNWGFRPKKLSFKLFNIQVKEVTQNDGTTTIANNLTSTVQVFGDSEYQLPYVLGSAHQGCLPPFPADVFMVPQYGYLTLNNGSQAVGRSSFYCLEYFPSQMLRTGNNFQFSYTFEDVPFHSSYAHSQSLDRLMNPLIDQYLYYLNRTQGTTSGTTNQSRLLFSQAGPQSMSLQARNWLPGPCYRQQRLSKTANDNNNSNIPWTRASKYHLNGRDSLVNPGPAMASHKDDEEKFFPMHGNLIFGKEGTTASNAELDNVMITDEEEIRTTNPVATEQYGTVANNLQSSNTAPTTRTVNDQGALPGMVWQDRDVYLQGPIWAKIPHTDGHFHPSPLMGGFGLKHPPPQIMIKNTPVPANPPTTFSPAKFASFITQYSTGQVSVEIEWELQKENSKRWNPEIQYTSNLCKSVNVDFTVDTNGVYSEPRPIGTRYLTRNL

SEQ ID NO: 541 - protein, 736 aa, synthetic construct
MAADGYLPDWLEDNLSEGIREWWALKPGVPQPKANQQHQDNRRGLVLPGYKYLGPGNGLDKGEPVNEADAAALEHDKAYDQQLKAGDNPYLKYNHADAEFQERLQEDTSFGGNLGRAVFQAKKRILEPLGLVEEAAKTAPGKKRPVDQSPQEPDSSSGVGKSGKQPARKRLNFGQTGDSESVPDPQPLGEPPAAPTSLGSNTMASGGGAPMADNNEGADGVGNSSGNWHCDSQWLGDRVITTSTRTWALPTYNNHLYKQISSQSGASNDNHYFGYSTPWGYFDFNRFHCHFSPRDWQRLINNNWGFRPKKLSFKLFNIQVKEVTQNDGTTTIANNLTSTVQVFADSEYQLPYVLGSAHQGCLPPFPADVFMVPQYGYLTLNNGSQAVGRSSFYCLEYFPSQMLRTGNNFQFSYTFEDVPFHSSYAHSQSLDRLMNPLIDQYLYYLNRTQGTTSGTTNQSRLLFSQAGPQSMSLQARNWLPGPCYRQQRLSKTANDNNNSNFPWTAASKYHLNGRDSLVNPGPAMASHKDDEEKFFPMHGNLIFGKEGTTASNAELDNVMITDEEEIRTTNPVATEQYGTVANNLQSSNTAPTTRTVNDQGALPGMVWQDRDVYLQGPIWAKIPHTDGHFHPSPLMGGFGLKHPPPQIMIKNTPVPANPPTTFSPAKFASFITQYSTGQVSVEIEWELQKENSKRWNPEIQYTSNLNKSVNVDFTVDTNGVYSEPRPIGTRYLTRNL

SEQ ID NO: 542 - protein, 736 aa, synthetic construct
MAADGYLPDWLEDNLSEGIREWWALKPGVPQPKANQQHQDNRRGLVLPGYKYLGPGNGLDKGEPVNEADAAALEHDKAYDQQLKAGDNPYLKYNHADAEFQERLQEDTSFGGNLGRAVFQAKKRILEPLGLVEEAAKTAPGKKRPVDQSPQEPDSSSGVGKSGKQPARKRLNFGQTGDSESVPDPQPLGEPPAAPTSLGSNTMASGGGAPMADNNEGADGVGNSSGNWHCDSQWLGDRVITTSTRTWALPTYNNHLYKQISSQSGASNDNHYFGYSTPWGYFDFNRFHCHFSPRDWQRLINNNWGFRPKKLSFKLFNIQVKEVTQNDGTTTIANNLTSTVQVFADSEYQLPYVLGSAHQGCLPPFPADVFMVPQYGYLTLNNGSQAVGRSSFYCLEYFPSQMLRTGNNFQFSYTFEDVPFHSSYAHSQSLDRLMNPLIDQYLYYLNRTQGTTSGTTNQSRLLFSQAGPQSMSLQARNWLPGPCYRQQRLSKTANDNNNSNIPWTAASKYHLNGRDSLVNPGPAMASHKDDEEKFFPMHGNLIFGKEGTTASNAELDNVMITDEEEIRTTNPVATEQYGTVANNLQSSNTAPTTRTVNDQGALPGMVWQDRDVYLQGPIWAKIPHTDGHFHPSPLMGGFGLKHPPPQIMIKNTPVPANPPTTFSPAKFASFITQYSTGQVSVEIEWELQKENSKRWNPEIQYTSNLNKSVNVDFTVDTNGVYSEPRPIGTRYLTRNL

SEQ ID NO: 543 - protein, 736 aa, synthetic construct
MAADGYLPDWLEDNLSEGIREWWALKPGVPQPKANQQHQDNRRGLVLPGYKYLGPGNGLDKGEPVNEADAAALEHDKAYDQQLKAGDNPYLKYNHADAEFQERLQEDTSFGGNLGRAVFQAKKRILEPLGLVEEAAKTAPGKKRPVDQSPQEPDSSSGVGKSGKQPARKRLNFGQTGDSESVPDPQPLGEPPAAPTSLGSNTMASGGGAPMADNNEGADGVGNSSGNWHCDSQWLGDRVITTSTRTWALPTYNNHLYKQISSQSGASNDNHYFGYSTPWGYFDFNRFHCHFSPRDWQRLINNNWGFRPKKLSFKLFNIQVKEVTQNDGTTTIANNLTSTVQVFADSEYQLPYVLGSAHQGCLPPFPADVFMVPQYGYLTLNNGSQAVGRSSFYCLEYFPSQMLRTGNNFQFSYTFEDVPFHSSYAHSQSLDRLMNPLIDQYLYYLNRTQGTTSGTTNQSRLLFSQAGPQSMSLQARNWLPGPCYRQQRLSKTANDNNNSNFPWTRASKYHLNGRDSLVNPGPAMASHKDDEEKFFPMHGNLIFGKEGTTASNAELDNVMITDEEEIRTTNPVATEQYGTVANNLQSSNTAPTTRTVNDQGALPGMVWQDRDVYLQGPIWAKIPHTDGHFHPSPLMGGFGLKHPPPQIMIKNTPVPANPPTTFSPAKFASFITQYSTGQVSVEIEWELQKENSKRWNPEIQYTSNLNKSVNVDFTVDTNGVYSEPRPIGTRYLTRNL

SEQ ID NO: 544 - protein, 736 aa, synthetic construct
MAADGYLPDWLEDNLSEGIREWWALKPGVPQPKANQQHQDNRRGLVLPGYKYLGPGNGLDKGEPVNEADAAALEHDKAYDQQLKAGDNPYLKYNHADAEFQERLQEDTSFGGNLGRAVFQAKKRILEPLGLVEEAAKTAPGKKRPVDQSPQEPDSSSGVGKSGKQPARKRLNFGQTGDSESVPDPQPLGEPPAAPTSLGSNTMASGGGAPMADNNEGADGVGNSSGNWHCDSQWLGDRVITTSTRTWALPTYNNHLYKQISSQSGASNDNHYFGYSTPWGYFDFNRFHCHFSPRDWQRLINNNWGFRPKKLSFKLFNIQVKEVTQNDGTTTIANNLTSTVQVFADSEYQLPYVLGSAHQGCLPPFPADVFMVPQYGYLTLNNGSQAVGRSSFYCLEYFPSQMLRTGNNFQFSYTFEDVPFHSSYAHSQSLDRLMNPLIDQYLYYLNRTQGTTSGTTNQSRLLFSQAGPQSMSLQARNWLPGPCYRQQRLSKTANDNNNSNFPWTAASKYHLNGRDSLVNPGPAMASHKDDEEKFFPMHGNLIFGKEGTTASNAELDNVMITDEEEIRTTNPVATEQYGTVANNLQSSNTAPTTRTVNDQGALPGMVWQDRDVYLQGPIWAKIPHTDGHFHPSPLMGGFGLKHPPPQIMIKNTPVPANPPTTFSPAKFASFITQYSTGQVSVEIEWELQKENSKRWNPEIQYTSNLCKSVNVDFTVDTNGVYSEPRPIGTRYLTRNL

SEQ ID NO: 545 - protein, 736 aa, synthetic construct
MAADGYLPDWLEDNLSEGIREWWALKPGVPQPKANQQHQDNRRGLVLPGYKYLGPGNGLDKGEPVNEADAAALEHDKAYDQQLKAGDNPYLKYNHADAEFQERLQEDTSFGGNLGRAVFQAKKRILEPLGLVEEAAKTAPGKKRPVDQSPQEPDSSSGVGKSGKQPARKRLNFGQTGDSESVPDPQPLGEPPAAPTSLGSNTMASGGGAPMADNNEGADGVGNSSGNWHCDSQWLGDRVITTSTRTWALPTYNNHLYKQISSQSGASNDNHYFGYSTPWGYFDFNRFHCHFSPRDWQRLINNNWGFRPKKLSFKLFNIQVKEVTQNDGTTTIANNLTSTVQVFADSEYQLPYVLGSAHQGCLPPFPADVFMVPQYGYLTLNNGSQAVGRSSFYCLEYFPSQMLRTGNNFQFSYTFEDVPFHSSYAHSQSLDRLMNPLIDQYLYYLNRTQGTTSGTTNQSRLLFSQAGPQSMSLQARNWLPGPCYRQQRLSKTANDNNNSNIPWTRASKYHLNGRDSLVNPGPAMASHKDDEEKFFPMHGNLIFGKEGTTASNAELDNVMITDEEEIRTTNPVATEQYGTVANNLQSSNTAPTTRTVNDQGALPGMVWQDRDVYLQGPIWAKIPHTDGHFHPSPLMGGFGLKHPPPQIMIKNTPVPANPPTTFSPAKFASFITQYSTGQVSVEIEWELQKENSKRWNPEIQYTSNLNKSVNVDFTVDTNGVYSEPRPIGTRYLTRNL

SEQ ID NO: 546 - protein, 736 aa, synthetic construct
MAADGYLPDWLEDNLSEGIREWWALKPGVPQPKANQQHQDNRRGLVLPGYKYLGPGNGLDKGEPVNEADAAALEHDKAYDQQLKAGDNPYLKYNHADAEFQERLQEDTSFGGNLGRAVFQAKKRILEPLGLVEEAAKTAPGKKRPVDQSPQEPDSSSGVGKSGKQPARKRLNFGQTGDSESVPDPQPLGEPPAAPTSLGSNTMASGGGAPMADNNEGADGVGNSSGNWHCDSQWLGDRVITTSTRTWALPTYNNHLYKQISSQSGASNDNHYFGYSTPWGYFDFNRFHCHFSPRDWQRLINNNWGFRPKKLSFKLFNIQVKEVTQNDGTTTIANNLTSTVQVFADSEYQLPYVLGSAHQGCLPPFPADVFMVPQYGYLTLNNGSQAVGRSSFYCLEYFPSQMLRTGNNFQFSYTFEDVPFHSSYAHSQSLDRLMNPLIDQYLYYLNRTQGTTSGTTNQSRLLFSQAGPQSMSLQARNWLPGPCYRQQRLSKTANDNNNSNIPWTAASKYHLNGRDSLVNPGPAMASHKDDEEKFFPMHGNLIFGKEGTTASNAELDNVMITDEEEIRTTNPVATEQYGTVANNLQSSNTAPTTRTVNDQGALPGMVWQDRDVYLQGPIWAKIPHTDGHFHPSPLMGGFGLKHPPPQIMIKNTPVPANPPTTFSPAKFASFITQYSTGQVSVEIEWELQKENSKRWNPEIQYTSNLCKSVNVDFTVDTNGVYSEPRPIGTRYLTRNL

SEQ ID NO: 547 - protein, 736 aa, synthetic construct
MAADGYLPDWLEDNLSEGIREWWALKPGVPQPKANQQHQDNRRGLVLPGYKYLGPGNGLDKGEPVNEADAAALEHDKAYDQQLKAGDNPYLKYNHADAEFQERLQEDTSFGGNLGRAVFQAKKRILEPLGLVEEAAKTAPGKKRPVDQSPQEPDSSSGVGKSGKQPARKRLNFGQTGDSESVPDPQPLGEPPAAPTSLGSNTMASGGGAPMADNNEGADGVGNSSGNWHCDSQWLGDRVITTSTRTWALPTYNNHLYKQISSQSGASNDNHYFGYSTPWGYFDFNRFHCHFSPRDWQRLINNNWGFRPKKLSFKLFNIQVKEVTQNDGTTTIANNLTSTVQVFADSEYQLPYVLGSAHQGCLPPFPADVFMVPQYGYLTLNNGSQAVGRSSFYCLEYFPSQMLRTGNNFQFSYTFEDVPFHSSYAHSQSLDRLMNPLIDQYLYYLNRTQGTTSGTTNQSRLLFSQAGPQSMSLQARNWLPGPCYRQQRLSKTANDNNNSNFPWTRASKYHLNGRDSLVNPGPAMASHKDDEEKFFPMHGNLIFGKEGTTASNAELDNVMITDEEEIRTTNPVATEQYGTVANNLQSSNTAPTTRTVNDQGALPGMVWQDRDVYLQGPIWAKIPHTDGHFHPSPLMGGFGLKHPPPQIMIKNTPVPANPPTTFSPAKFASFITQYSTGQVSVEIEWELQKENSKRWNPEIQYTSNLCKSVNVDFTVDTNGVYSEPRPIGTRYLTRNL

SEQ ID NO: 548 - protein, 736 aa, synthetic construct
MAADGYLPDWLEDNLSEGIREWWALKPGVPQPKANQQHQDNRRGLVLPGYKYLGPGNGLDKGEPVNEADAAALEHDKAYDQQLKAGDNPYLKYNHADAEFQERLQEDTSFGGNLGRAVFQAKKRILEPLGLVEEAAKTAPGKKRPVDQSPQEPDSSSGVGKSGKQPARKRLNFGQTGDSESVPDPQPLGEPPAAPTSLGSNTMASGGGAPMADNNEGADGVGNSSGNWHCDSQWLGDRVITTSTRTWALPTYNNHLYKQISSQSGASNDNHYFGYSTPWGYFDFNRFHCHFSPRDWQRLINNNWGFRPKKLSFKLFNIQVKEVTQNDGTTTIANNLTSTVQVFADSEYQLPYVLGSAHQGCLPPFPADVFMVPQYGYLTLNNGSQAVGRSSFYCLEYFPSQMLRTGNNFQFSYTFEDVPFHSSYAHSQSLDRLMNPLIDQYLYYLNRTQGTTSGTTNQSRLLFSQAGPQSMSLQARNWLPGPCYRQQRLSKTANDNNNSNIPWTRASKYHLNGRDSLVNPGPAMASHKDDEEKFFPMHGNLIFGKEGTTASNAELDNVMITDEEEIRTTNPVATEQYGTVANNLQSSNTAPTTRTVNDQGALPGMVWQDRDVYLQGPIWAKIPHTDGHFHPSPLMGGFGLKHPPPQIMIKNTPVPANPPTTFSPAKFASFITQYSTGQVSVEIEWELQKENSKRWNPEIQYTSNLCKSVNVDFTVDTNGVYSEPRPIGTRYLTRNL

SEQ ID NO: 549 - protein, 724 aa, synthetic construct
MSFVDHPPDWLEEVGEGLREFLGLEAGPPKPKPNQQHQDQARGLVLPGYNYLGPGNGLDRGEPVNRADEVAREHDISYNEQLEAGDNPYLKYNHADAEFQEKLADDTSFGGNLGKAVFQAKKRVLEPFGLVEEGAKTAPTGKRIDDHFPKRKKARTEEDSKPSTSSDAEAGPSGSQQLQIPAQPASSLGADTMSAGGGGPLGDNNQGADGVGNASGDWHCDSTWMGDRVVTKSTRTWVLPSYNNHQYREIKSGSVDGSNANAYFGYSTPWGYFDFNRFHSHWSPRDWQRLINNYWGFRPRSLRVKIFNIQVKEVTVQDSTTTIANNLTSTVQVFGDDDYQLPYVVGNGTEGCLPAFPPQVFTLPQYGYATLNRDNTENPTERSSFFCLEYFPSKMLRTGNNFEFTYNFEEVPFHSSFAPSQNLFKLANPLVDQYLYRFVSTNNTGGVQFNKNLAGRYANTYKNWFPGPMGRTQGWNLGSGVNRASVSAFATTNRMELEGASYQVPPQPNGMTNNLQGSNTYALENTMIFNSQPANPGTTATYLEGNMLITSESETQPVNRVAYNVGGQMATNNQSSTTAPATGTYNLQEIVPGSVWMERDVYLQGPIWAKIPETGAHFHPSPAMGGFGLKHPPPMMLIKNTPVPGNITSFSDVPVSSFITQYSTGQVTVEMEWELKKENSKRWNPEIQYTNNYNDPQFVDFAPDSTGEYRTTRPIGTRYLTRPL

SEQ ID NO: 550 - protein, 724 aa, synthetic construct
MSFVDHPPDWLEEVGEGLREFLGLEAGPPKPKPNQQHQDQARGLVLPGYNYLGPGNGLDRGEPVNRADEVAREHDISYNEQLEAGDNPYLKYNHADAEFQEKLADDTSFGGNLGKAVFQAKKRVLEPFGLVEEGAKTAPTGKRIDDHFPKRKKARTEEDSKPSTSSDAEAGPSGSQQLQIPAQPASSLGADTMSAGGGGPLGDNNQGADGVGNASGDWHCDSTWMGDRVVTKSTRTWVLPSYNNHQYREIKSGSVDGSNANAYFGYSTPWGYFDFNRFHSHWSPRDWQRLINNYWGFRPRSLRVKIFNIQVKEVTVQDSTTTIANNLTSTVQVFGDDDYQLPYVVGNGTEGCLPAFPPQVFTLPQYGYATLNRDNTENPTERSSFFCLEYFPSKMLRTGNNFEFTYNFEEVPFHSSFAPSQNLFKLANPLVDQYLYRFVSTNNTGGVQFNKNLAGRYANTYKNWFPGPMGRTQGWNLGSGVNRASVIAFATTNRMELEGASYQVPPQPNGMTNNLQGSNTYALENTMIFNSQPANPGTTATYLEGNMLITSESETQPVNRVAYNVGGQMATNNQSSTTAPATGTYNLQEIVPGSVWMERDVYLQGPIWAKIPETGAHFHPSPAMGGFGLKHPPPMMLIKNTPVPGNITSFSDVPVSSFITQYSTGQVTVEMEWELKKENSKRWNPEIQYTNNYNDPQFVDFAPDSTGEYRTTRPIGTRYLTRPL

SEQ ID NO: 551 - protein, 724 aa, synthetic construct
MSFVDHPPDWLEEVGEGLREFLGLEAGPPKPKPNQQHQDQARGLVLPGYNYLGPGNGLDRGEPVNRADEVAREHDISYNEQLEAGDNPYLKYNHADAEFQEKLADDTSFGGNLGKAVFQAKKRVLEPFGLVEEGAKTAPTGKRIDDHFPKRKKARTEEDSKPSTSSDAEAGPSGSQQLQIPAQPASSLGADTMSAGGGGPLGDNNQGADGVGNASGDWHCDSTWMGDRVVTKSTRTWVLPSYNNHQYREIKSGSVDGSNANAYFGYSTPWGYFDFNRFHSHWSPRDWQRLINNYWGFRPRSLRVKIFNIQVKEVTVQDSTTTIANNLTSTVQVFGDDDYQLPYVVGNGTEGCLPAFPPQVFTLPQYGYATLNRDNTENPTERSSFFCLEYFPSKMLRTGNNFEFTYNFEEVPFHSSFAPSQNLFKLANPLVDQYLYRFVSTNNTGGVQFNKNLAGRYANTYKNWFPGPMGRTQGWNLGSGVNRASVSAFARTNRMELEGASYQVPPQPNGMTNNLQGSNTYALENTMIFNSQPANPGTTATYLEGNMLITSESETQPVNRVAYNVGGQMATNNQSSTTAPATGTYNLQEIVPGSVWMERDVYLQGPIWAKIPETGAHFHPSPAMGGFGLKHPPPMMLIKNTPVPGNITSFSDVPVSSFITQYSTGQVTVEMEWELKKENSKRWNPEIQYTNNYNDPQFVDFAPDSTGEYRTTRPIGTRYLTRPL

SEQ ID NO: 552 - protein, 724 aa, synthetic construct
MSFVDHPPDWLEEVGEGLREFLGLEAGPPKPKPNQQHQDQARGLVLPGYNYLGPGNGLDRGEPVNRADEVAREHDISYNEQLEAGDNPYLKYNHADAEFQEKLADDTSFGGNLGKAVFQAKKRVLEPFGLVEEGAKTAPTGKRIDDHFPKRKKARTEEDSKPSTSSDAEAGPSGSQQLQIPAQPASSLGADTMSAGGGGPLGDNNQGADGVGNASGDWHCDSTWMGDRVVTKSTRTWVLPSYNNHQYREIKSGSVDGSNANAYFGYSTPWGYFDFNRFHSHWSPRDWQRLINNYWGFRPRSLRVKIFNIQVKEVTVQDSTTTIANNLTSTVQVFGDDDYQLPYVVGNGTEGCLPAFPPQVFTLPQYGYATLNRDNTENPTERSSFFCLEYFPSKMLRTGNNFEFTYNFEEVPFHSSFAPSQNLFKLANPLVDQYLYRFVSTNNTGGVQFNKNLAGRYANTYKNWFPGPMGRTQGWNLGSGVNRASVSAFATTNRMELEGASYQVPPQPNGMTNNLQGSNTYALENTMIFNSQPANPGTTATYLEGNMLITSESETQPVNRVAYNVGGQMATNNQSSTTAPATGTYNLQEIVPGSVWMERDVYLQGPIWAKIPETGAHFHPSPAMGGFGLKHPPPMMLIKNTPVPGNITSFSDVPVSSFITQYSTGQVTVEMEWELKKENSKRWNPEIQYTNNYCDPQFVDFAPDSTGEYRTTRPIGTRYLTRPL

SEQ ID NO: 553 - protein, 724 aa, synthetic construct
MSFVDHPPDWLEEVGEGLREFLGLEAGPPKPKPNQQHQDQARGLVLPGYNYLGPGNGLDRGEPVNRADEVAREHDISYNEQLEAGDNPYLKYNHADAEFQEKLADDTSFGGNLGKAVFQAKKRVLEPFGLVEEGAKTAPTGKRIDDHFPKRKKARTEEDSKPSTSSDAEAGPSGSQQLQIPAQPASSLGADTMSAGGGGPLGDNNQGADGVGNASGDWHCDSTWMGDRVVTKSTRTWVLPSYNNHQYREIKSGSVDGSNANAYFGYSTPWGYFDFNRFHSHWSPRDWQRLINNYWGFRPRSLRVKIFNIQVKEVTVQDSTTTIANNLTSTVQVFGDDDYQLPYVVGNGTEGCLPAFPPQVFTLPQYGYATLNRDNTENPTERSSFFCLEYFPSKMLRTGNNFEFTYNFEEVPFHSSFAPSQNLFKLANPLVDQYLYRFVSTNNTGGVQFNKNLAGRYANTYKNWFPGPMGRTQGWNLGSGVNRASVIAFARTNRMELEGASYQVPPQPNGMTNNLQGSNTYALENTMIFNSQPANPGTTATYLEGNMLITSESETQPVNRVAYNVGGQMATNNQSSTTAPATGTYNLQEIVPGSVWMERDVYLQGPIWAKIPETGAHFHPSPAMGGFGLKHPPPMMLIKNTPVPGNITSFSDVPVSSFITQYSTGQVTVEMEWELKKENSKRWNPEIQYTNNYNDPQFVDFAPDSTGEYRTTRPIGTRYLTRPL

SEQ ID NO: 554 - protein, 724 aa, synthetic construct
MSFVDHPPDWLEEVGEGLREFLGLEAGPPKPKPNQQHQDQARGLVLPGYNYLGPGNGLDRGEPVNRADEVAREHDISYNEQLEAGDNPYLKYNHADAEFQEKLADDTSFGGNLGKAVFQAKKRVLEPFGLVEEGAKTAPTGKRIDDHFPKRKKARTEEDSKPSTSSDAEAGPSGSQQLQIPAQPASSLGADTMSAGGGGPLGDNNQGADGVGNASGDWHCDSTWMGDRVVTKSTRTWVLPSYNNHQYREIKSGSVDGSNANAYFGYSTPWGYFDFNRFHSHWSPRDWQRLINNYWGFRPRSLRVKIFNIQVKEVTVQDSTTTIANNLTSTVQVFGDDDYQLPYVVGNGTEGCLPAFPPQVFTLPQYGYATLNRDNTENPTERSSFFCLEYFPSKMLRTGNNFEFTYNFEEVPFHSSFAPSQNLFKLANPLVDQYLYRFVSTNNTGGVQFNKNLAGRYANTYKNWFPGPMGRTQGWNLGSGVNRASVIAFATTNRMELEGASYQVPPQPNGMTNNLQGSNTYALENTMIFNSQPANPGTTATYLEGNMLITSESETQPVNRVAYNVGGQMATNNQSSTTAPATGTYNLQEIVPGSVWMERDVYLQGPIWAKIPETGAHFHPSPAMGGFGLKHPPPMMLIKNTPVPGNITSFSDVPVSSFITQYSTGQVTVEMEWELKKENSKRWNPEIQYTNNYCDPQFVDFAPDSTGEYRTTRPIGTRYLTRPL

SEQ ID NO: 555 - protein, 724 aa, synthetic construct
MSFVDHPPDWLEEVGEGLREFLGLEAGPPKPKPNQQHQDQARGLVLPGYNYLGPGNGLDRGEPVNRADEVAREHDISYNEQLEAGDNPYLKYNHADAEFQEKLADDTSFGGNLGKAVFQAKKRVLEPFGLVEEGAKTAPTGKRIDDHFPKRKKARTEEDSKPSTSSDAEAGPSGSQQLQIPAQPASSLGADTMSAGGGGPLGDNNQGADGVGNASGDWHCDSTWMGDRVVTKSTRTWVLPSYNNHQYREIKSGSVDGSNANAYFGYSTPWGYFDFNRFHSHWSPRDWQRLINNYWGFRPRSLRVKIFNIQVKEVTVQDSTTTIANNLTSTVQVFGDDDYQLPYVVGNGTEGCLPAFPPQVFTLPQYGYATLNRDNTENPTERSSFFCLEYFPSKMLRTGNNFEFTYNFEEVPFHSSFAPSQNLFKLANPLVDQYLYRFVSTNNTGGVQFNKNLAGRYANTYKNWFPGPMGRTQGWNLGSGVNRASVSAFARTNRMELEGASYQVPPQPNGMTNNLQGSNTYALENTMIFNSQPANPGTTATYLEGNMLITSESETQPVNRVAYNVGGQMATNNQSSTTAPATGTYNLQEIVPGSVWMERDVYLQGPIWAKIPETGAHFHPSPAMGGFGLKHPPPMMLIKNTPVPGNITSFSDVPVSSFITQYSTGQVTVEMEWELKKENSKRWNPEIQYTNNYCDPQFVDFAPDSTGEYRTTRPIGTRYLTRPL

SEQ ID NO: 556 - protein, 724 aa, synthetic construct
MSFVDHPPDWLEEVGEGLREFLGLEAGPPKPKPNQQHQDQARGLVLPGYNYLGPGNGLDRGEPVNRADEVAREHDISYNEQLEAGDNPYLKYNHADAEFQEKLADDTSFGGNLGKAVFQAKKRVLEPFGLVEEGAKTAPTGKRIDDHFPKRKKARTEEDSKPSTSSDAEAGPSGSQQLQIPAQPASSLGADTMSAGGGGPLGDNNQGADGVGNASGDWHCDSTWMGDRVVTKSTRTWVLPSYNNHQYREIKSGSVDGSNANAYFGYSTPWGYFDFNRFHSHWSPRDWQRLINNYWGFRPRSLRVKIFNIQVKEVTVQDSTTTIANNLTSTVQVFGDDDYQLPYVVGNGTEGCLPAFPPQVFTLPQYGYATLNRDNTENPTERSSFFCLEYFPSKMLRTGNNFEFTYNFEEVPFHSSFAPSQNLFKLANPLVDQYLYRFVSTNNTGGVQFNKNLAGRYANTYKNWFPGPMGRTQGWNLGSGVNRASVIAFARTNRMELEGASYQVPPQPNGMTNNLQGSNTYALENTMIFNSQPANPGTTATYLEGNMLITSESETQPVNRVAYNVGGQMATNNQSSTTAPATGTYNLQEIVPGSVWMERDVYLQGPIWAKIPETGAHFHPSPAMGGFGLKHPPPMMLIKNTPVPGNITSFSDVPVSSFITQYSTGQVTVEMEWELKKENSKRWNPEIQYTNNYCDPQFVDFAPDSTGEYRTTRPIGTRYLTRPL

SEQ ID NO: 557 - protein, 724 aa, synthetic construct
MSFVDHPPDWLEEVGEGLREFLGLEAGPPKPKPNQQHQDQARGLVLPGYNYLGPGNGLDRGEPVNRADEVAREHDISYNEQLEAGDNPYLKYNHADAEFQEKLADDTSFGGNLGKAVFQAKKRVLEPFGLVEEGAKTAPTGKRIDDHFPKRKKARTEEDSKPSTSSDAEAGPSGSQQLQIPAQPASSLGADTMSAGGGGPLGDNNQGADGVGNASGDWHCDSTWMGDRVVTKSTRTWVLPSYNNHQYREIKSGSVDGSNANAYFGYSTPWGYFDFNRFHSHWSPRDWQRLINNYWGFRPRSLRVKIFNIQVKEVTVQDSTTTIANNLTSTVQVFTDDDYQLPYVVGNGTEGCLPAFPPQVFTLPQYGYATLNRDNTENPTERSSFFCLEYFPSKMLRTGNNFEFTYNFEEVPFHSSFAPSQNLFKLANPLVDQYLYRFVSTNNTGGVQFNKNLAGRYANTYKNWFPGPMGRTQGWNLGSGVNRASVSAFATTNRMELEGASYQVPPQPNGMTNNLQGSNTYALENTMIFNSQPANPGTTATYLEGNMLITSESETQPVNRVAYNVGGQMATNNQSSTTAPATGTYNLQEIVPGSVWMERDVYLQGPIWAKIPETGAHFHPSPAMGGFGLKHPPPMMLIKNTPVPGNITSFSDVPVSSFITQYSTGQVTVEMEWELKKENSKRWNPEIQYTNNLNDPQFVDFAPDSTGEYRTTRPIGTRYLTRPL

SEQ ID NO: 558 - protein, 724 aa, synthetic construct
MSFVDHPPDWLEEVGEGLREFLGLEAGPPKPKPNQQHQDQARGLVLPGYNYLGPGNGLDRGEPVNRADEVAREHDISYNEQLEAGDNPYLKYNHADAEFQEKLADDTSFGGNLGKAVFQAKKRVLEPFGLVEEGAKTAPTGKRIDDHFPKRKKARTEEDSKPSTSSDAEAGPSGSQQLQIPAQPASSLGADTMSAGGGGPLGDNNQGADGVGNASGDWHCDSTWMGDRVVTKSTRTWVLPSYNNHQYREIKSGSVDGSNANAYFGYSTPWGYFDFNRFHSHWSPRDWQRLINNYWGFRPRSLRVKIFNIQVKEVTVQDSTTTIANNLTSTVQVFTDDDYQLPYVVGNGTEGCLPAFPPQVFTLPQYGYATLNRDNTENPTERSSFFCLEYFPSKMLRTGNNFEFTYNFEEVPFHSSFAPSQNLFKLANPLVDQYLYRFVSTNNTGGVQFNKNLAGRYANTYKNWFPGPMGRTQGWNLGSGVNRASVIAFATTNRMELEGASYQVPPQPNGMTNNLQGSNTYALENTMIFNSQPANPGTTATYLEGNMLITSESETQPVNRVAYNVGGQMATNNQSSTTAPATGTYNLQEIVPGSVWMERDVYLQGPIWAKIPETGAHFHPSPAMGGFGLKHPPPMMLIKNTPVPGNITSFSDVPVSSFITQYSTGQVTVEMEWELKKENSKRWNPEIQYTNNLNDPQFVDFAPDSTGEYRTTRPIGTRYLTRPL

SEQ ID NO: 559 - protein, 724 aa, synthetic construct
MSFVDHPPDWLEEVGEGLREFLGLEAGPPKPKPNQQHQDQARGLVLPGYNYLGPGNGLDRGEPVNRADEVAREHDISYNEQLEAGDNPYLKYNHADAEFQEKLADDTSFGGNLGKAVFQAKKRVLEPFGLVEEGAKTAPTGKRIDDHFPKRKKARTEEDSKPSTSSDAEAGPSGSQQLQIPAQPASSLGADTMSAGGGGPLGDNNQGADGVGNASGDWHCDSTWMGDRVVTKSTRTWVLPSYNNHQYREIKSGSVDGSNANAYFGYSTPWGYFDFNRFHSHWSPRDWQRLINNYWGFRPRSLRVKIFNIQVKEVTVQDSTTTIANNLTSTVQVFTDDDYQLPYVVGNGTEGCLPAFPPQVFTLPQYGYATLNRDNTENPTERSSFFCLEYFPSKMLRTGNNFEFTYNFEEVPFHSSFAPSQNLFKLANPLVDQYLYRFVSTNNTGGVQFNKNLAGRYANTYKNWFPGPMGRTQGWNLGSGVNRASVSAFARTNRMELEGASYQVPPQPNGMTNNLQGSNTYALENTMIFNSQPANPGTTATYLEGNMLITSESETQPVNRVAYNVGGQMATNNQSSTTAPATGTYNLQEIVPGSVWMERDVYLQGPIWAKIPETGAHFHPSPAMGGFGLKHPPPMMLIKNTPVPGNITSFSDVPVSSFITQYSTGQVTVEMEWELKKENSKRWNPEIQYTNNLNDPQFVDFAPDSTGEYRTTRPIGTRYLTRPL

SEQ ID NO: 560 - protein, 724 aa, synthetic construct
MSFVDHPPDWLEEVGEGLREFLGLEAGPPKPKPNQQHQDQARGLVLPGYNYLGPGNGLDRGEPVNRADEVAREHDISYNEQLEAGDNPYLKYNHADAEFQEKLADDTSFGGNLGKAVFQAKKRVLEPFGLVEEGAKTAPTGKRIDDHFPKRKKARTEEDSKPSTSSDAEAGPSGSQQLQIPAQPASSLGADTMSAGGGGPLGDNNQGADGVGNASGDWHCDSTWMGDRVVTKSTRTWVLPSYNNHQYREIKSGSVDGSNANAYFGYSTPWGYFDFNRFHSHWSPRDWQRLINNYWGFRPRSLRVKIFNIQVKEVTVQDSTTTIANNLTSTVQVFTDDDYQLPYVVGNGTEGCLPAFPPQVFTLPQYGYATLNRDNTENPTERSSFFCLEYFPSKMLRTGNNFEFTYNFEEVPFHSSFAPSQNLFKLANPLVDQYLYRFVSTNNTGGVQFNKNLAGRYANTYKNWFPGPMGRTQGWNLGSGVNRASVSAFATTNRMELEGASYQVPPQPNGMTNNLQGSNTYALENTMIFNSQPANPGTTATYLEGNMLITSESETQPVNRVAYNVGGQMATNNQSSTTAPATGTYNLQEIVPGSVWMERDVYLQGPIWAKIPETGAHFHPSPAMGGFGLKHPPPMMLIKNTPVPGNITSFSDVPVSSFITQYSTGQVTVEMEWELKKENSKRWNPEIQYTNNLCDPQFVDFAPDSTGEYRTTRPIGTRYLTRPL

SEQ ID NO: 561 - protein, 724 aa, synthetic construct
MSFVDHPPDWLEEVGEGLREFLGLEAGPPKPKPNQQHQDQARGLVLPGYNYLGPGNGLDRGEPVNRADEVAREHDISYNEQLEAGDNPYLKYNHADAEFQEKLADDTSFGGNLGKAVFQAKKRVLEPFGLVEEGAKTAPTGKRIDDHFPKRKKARTEEDSKPSTSSDAEAGPSGSQQLQIPAQPASSLGADTMSAGGGGPLGDNNQGADGVGNASGDWHCDSTWMGDRVVTKSTRTWVLPSYNNHQYREIKSGSVDGSNANAYFGYSTPWGYFDFNRFHSHWSPRDWQRLINNYWGFRPRSLRVKIFNIQVKEVTVQDSTTTIANNLTSTVQVFTDDDYQLPYVVGNGTEGCLPAFPPQVFTLPQYGYATLNRDNTENPTERSSFFCLEYFPSKMLRTGNNFEFTYNFEEVPFHSSFAPSQNLFKLANPLVDQYLYRFVSTNNTGGVQFNKNLAGRYANTYKNWFPGPMGRTQGWNLGSGVNRASVIAFARTNRMELEGASYQVPPQPNGMTNNLQGSNTYALENTMIFNSQPANPGTTATYLEGNMLITSESETQPVNRVAYNVGGQMATNNQSSTTAPATGTYNLQEIVPGSVWMERDVYLQGPIWAKIPETGAHFHPSPAMGGFGLKHPPPMMLIKNTPVPGNITSFSDVPVSSFITQYSTGQVTVEMEWELKKENSKRWNPEIQYTNNLNDPQFVDFAPDSTGEYRTTRPIGTRYLTRPL

SEQ ID NO: 562 - protein, 724 aa, synthetic construct
MSFVDHPPDWLEEVGEGLREFLGLEAGPPKPKPNQQHQDQARGLVLPGYNYLGPGNGLDRGEPVNRADEVAREHDISYNEQLEAGDNPYLKYNHADAEFQEKLADDTSFGGNLGKAVFQAKKRVLEPFGLVEEGAKTAPTGKRIDDHFPKRKKARTEEDSKPSTSSDAEAGPSGSQQLQIPAQPASSLGADTMSAGGGGPLGDNNQGADGVGNASGDWHCDSTWMGDRVVTKSTRTWVLPSYNNHQYREIKSGSVDGSNANAYFGYSTPWGYFDFNRFHSHWSPRDWQRLINNYWGFRPRSLRVKIFNIQVKEVTVQDSTTTIANNLTSTVQVFTDDDYQLPYVVGNGTEGCLPAFPPQVFTLPQYGYATLNRDNTENPTERSSFFCLEYFPSKMLRTGNNFEFTYNFEEVPFHSSFAPSQNLFKLANPLVDQYLYRFVSTNNTGGVQFNKNLAGRYANTYKNWFPGPMGRTQGWNLGSGVNRASVIAFATTNRMELEGASYQVPPQPNGMTNNLQGSNTYALENTMIFNSQPANPGTTATYLEGNMLITSESETQPVNRVAYNVGGQMATNNQSSTTAPATGTYNLQEIVPGSVWMERDVYLQGPIWAKIPETGAHFHPSPAMGGFGLKHPPPMMLIKNTPVPGNITSFSDVPVSSFITQYSTGQVTVEMEWELKKENSKRWNPEIQYTNNLCDPQFVDFAPDSTGEYRTTRPIGTRYLTRPL

SEQ ID NO: 563 - protein, 724 aa, synthetic construct
MSFVDHPPDWLEEVGEGLREFLGLEAGPPKPKPNQQHQDQARGLVLPGYNYLGPGNGLDRGEPVNRADEVAREHDISYNEQLEAGDNPYLKYNHADAEFQEKLADDTSFGGNLGKAVFQAKKRVLEPFGLVEEGAKTAPTGKRIDDHFPKRKKARTEEDSKPSTSSDAEAGPSGSQQLQIPAQPASSLGADTMSAGGGGPLGDNNQGADGVGNASGDWHCDSTWMGDRVVTKSTRTWVLPSYNNHQYREIKSGSVDGSNANAYFGYSTPWGYFDFNRFHSHWSPRDWQRLINNYWGFRPRSLRVKIFNIQVKEVTVQDSTTTIANNLTSTVQVFTDDDYQLPYVVGNGTEGCLPAFPPQVFTLPQYGYATLNRDNTENPTERSSFFCLEYFPSKMLRTGNNFEFTYNFEEVPFHSSFAPSQNLFKLANPLVDQYLYRFVSTNNTGGVQFNKNLAGRYANTYKNWFPGPMGRTQGWNLGSGVNRASVSAFARTNRMELEGASYQVPPQPNGMTNNLQGSNTYALENTMIFNSQPANPGTTATYLEGNMLITSESETQPVNRVAYNVGGQMATNNQSSTTAPATGTYNLQEIVPGSVWMERDVYLQGPIWAKIPETGAHFHPSPAMGGFGLKHPPPMMLIKNTPVPGNITSFSDVPVSSFITQYSTGQVTVEMEWELKKENSKRWNPEIQYTNNLCDPQFVDFAPDSTGEYRTTRPIGTRYLTRPL

SEQ ID NO: 564 - protein, 724 aa, synthetic construct
MSFVDHPPDWLEEVGEGLREFLGLEAGPPKPKPNQQHQDQARGLVLPGYNYLGPGNGLDRGEPVNRADEVAREHDISYNEQLEAGDNPYLKYNHADAEFQEKLADDTSFGGNLGKAVFQAKKRVLEPFGLVEEGAKTAPTGKRIDDHFPKRKKARTEEDSKPSTSSDAEAGPSGSQQLQIPAQPASSLGADTMSAGGGGPLGDNNQGADGVGNASGDWHCDSTWMGDRVVTKSTRTWVLPSYNNHQYREIKSGSVDGSNANAYFGYSTPWGYFDFNRFHSHWSPRDWQRLINNYWGFRPRSLRVKIFNIQVKEVTVQDSTTTIANNLTSTVQVFTDDDYQLPYVVGNGTEGCLPAFPPQVFTLPQYGYATLNRDNTENPTERSSFFCLEYFPSKMLRTGNNFEFTYNFEEVPFHSSFAPSQNLFKLANPLVDQYLYRFVSTNNTGGVQFNKNLAGRYANTYKNWFPGPMGRTQGWNLGSGVNRASVIAFARTNRMELEGASYQVPPQPNGMTNNLQGSNTYALENTMIFNSQPANPGTTATYLEGNMLITSESETQPVNRVAYNVGGQMATNNQSSTTAPATGTYNLQEIVPGSVWMERDVYLQGPIWAKIPETGAHFHPSPAMGGFGLKHPPPMMLIKNTPVPGNITSFSDVPVSSFITQYSTGQVTVEMEWELKKENSKRWNPEIQYTNNLCDPQFVDFAPDSTGEYRTTRPIGTRYLTRPL

SEQ ID NO: 565 - protein, 724 aa, synthetic construct
MSFVDHPPDWLEEVGEGLREFLGLEAGPPKPKPNQQHQDQARGLVLPGYNYLGPGNGLDRGEPVNRADEVAREHDISYNEQLEAGDNPYLKYNHADAEFQEKLADDTSFGGNLGKAVFQAKKRVLEPFGLVEEGAKTAPTGKRIDDHFPKRKKARTEEDSKPSTSSDAEAGPSGSQQLQIPAQPASSLGADTMSAGGGGPLGDNNQGADGVGNASGDWHCDSTWMGDRVVTKSTRTWVLPSYNNHQYREIKSGSVDGSNANAYFGYSTPWGYFDFNRFHSHWSPRDWQRLINNYWGFRPRSLRVKIFNIQVKEVTVQDSTTTIANNLTSTVQVFGDDDYQLPYVVGNGTEGCLPAFPPQVFTLPQYGYATLNRDNTENPTERSSFFCLEYFPSKMLRTGNNFEFTYNFEEVPFHSSFAPSQNLFKLANPLVDQYLYRFVSTNNTGGVQFNKNLAGRYANTYKNWFPGPMGRTQGWNLGSGVNRASVSAFATTNRMELEGASYQVPPQPNGMTNNLQGSNTYALENTMIFNSQPANPGTTATYLEGNMLITSESETQPVNRVAYNVGGQMATNNQSSTTAPATGTYNLQEIVPGSVWMERDVYLQGPIWAKIPETGAHFHPSPAMGGFGLKHPPPMMLIKNTPVPGNITSFSDVPVSSFITQYSTGQVTVEMEWELKKENSKRWNPEIQYTNNLNDPQFVDFAPDSTGEYRTTRPIGTRYLTRPL

SEQ ID NO: 566 - protein, 724 aa, synthetic construct
MSFVDHPPDWLEEVGEGLREFLGLEAGPPKPKPNQQHQDQARGLVLPGYNYLGPGNGLDRGEPVNRADEVAREHDISYNEQLEAGDNPYLKYNHADAEFQEKLADDTSFGGNLGKAVFQAKKRVLEPFGLVEEGAKTAPTGKRIDDHFPKRKKARTEEDSKPSTSSDAEAGPSGSQQLQIPAQPASSLGADTMSAGGGGPLGDNNQGADGVGNASGDWHCDSTWMGDRVVTKSTRTWVLPSYNNHQYREIKSGSVDGSNANAYFGYSTPWGYFDFNRFHSHWSPRDWQRLINNYWGFRPRSLRVKIFNIQVKEVTVQDSTTTIANNLTSTVQVFGDDDYQLPYVVGNGTEGCLPAFPPQVFTLPQYGYATLNRDNTENPTERSSFFCLEYFPSKMLRTGNNFEFTYNFEEVPFHSSFAPSQNLFKLANPLVDQYLYRFVSTNNTGGVQFNKNLAGRYANTYKNWFPGPMGRTQGWNLGSGVNRASVIAFATTNRMELEGASYQVPPQPNGMTNNLQGSNTYALENTMIFNSQPANPGTTATYLEGNMLITSESETQPVNRVAYNVGGQMATNNQSSTTAPATGTYNLQEIVPGSVWMERDVYLQGPIWAKIPETGAHFHPSPAMGGFGLKHPPPMMLIKNTPVPGNITSFSDVPVSSFITQYSTGQVTVEMEWELKKENSKRWNPEIQYTNNLNDPQFVDFAPDSTGEYRTTRPIGTRYLTRPL

SEQ ID NO: 567 - protein, 724 aa, synthetic construct
MSFVDHPPDWLEEVGEGLREFLGLEAGPPKPKPNQQHQDQARGLVLPGYNYLGPGNGLDRGEPVNRADEVAREHDISYNEQLEAGDNPYLKYNHADAEFQEKLADDTSFGGNLGKAVFQAKKRVLEPFGLVEEGAKTAPTGKRIDDHFPKRKKARTEEDSKPSTSSDAEAGPSGSQQLQIPAQPASSLGADTMSAGGGGPLGDNNQGADGVGNASGDWHCDSTWMGDRVVTKSTRTWVLPSYNNHQYREIKSGSVDGSNANAYFGYSTPWGYFDFNRFHSHWSPRDWQRLINNYWGFRPRSLRVKIFNIQVKEVTVQDSTTTIANNLTSTVQVFGDDDYQLPYVVGNGTEGCLPAFPPQVFTLPQYGYATLNRDNTENPTERSSFFCLEYFPSKMLRTGNNFEFTYNFEEVPFHSSFAPSQNLFKLANPLVDQYLYRFVSTNNTGGVQFNKNLAGRYANTYKNWFPGPMGRTQGWNLGSGVNRASVSAFARTNRMELEGASYQVPPQPNGMTNNLQGSNTYALENTMIFNSQPANPGTTATYLEGNMLITSESETQPVNRVAYNVGGQMATNNQSSTTAPATGTYNLQEIVPGSVWMERDVYLQGPIWAKIPETGAHFHPSPAMGGFGLKHPPPMMLIKNTPVPGNITSFSDVPVSSFITQYSTGQVTVEMEWELKKENSKRWNPEIQYTNNLNDPQFVDFAPDSTGEYRTTRPIGTRYLTRPL

SEQ ID NO: 568 - protein, 724 aa, synthetic construct
MSFVDHPPDWLEEVGEGLREFLGLEAGPPKPKPNQQHQDQARGLVLPGYNYLGPGNGLDRGEPVNRADEVAREHDISYNEQLEAGDNPYLKYNHADAEFQEKLADDTSFGGNLGKAVFQAKKRVLEPFGLVEEGAKTAPTGKRIDDHFPKRKKARTEEDSKPSTSSDAEAGPSGSQQLQIPAQPASSLGADTMSAGGGGPLGDNNQGADGVGNASGDWHCDSTWMGDRVVTKSTRTWVLPSYNNHQYREIKSGSVDGSNANAYFGYSTPWGYFDFNRFHSHWSPRDWQRLINNYWGFRPRSLRVKIFNIQVKEVTVQDSTTTIANNLTSTVQVFGDDDYQLPYVVGNGTEGCLPAFPPQVFTLPQYGYATLNRDNTENPTERSSFFCLEYFPSKMLRTGNNFEFTYNFEEVPFHSSFAPSQNLFKLANPLVDQYLYRFVSTNNTGGVQFNKNLAGRYANTYKNWFPGPMGRTQGWNLGSGVNRASVSAFATTNRMELEGASYQVPPQPNGMTNNLQGSNTYALENTMIFNSQPANPGTTATYLEGNMLITSESETQPVNRVAYNVGGQMATNNQSSTTAPATGTYNLQEIVPGSVWMERDVYLQGPIWAKIPETGAHFHPSPAMGGFGLKHPPPMMLIKNTPVPGNITSFSDVPVSSFITQYSTGQVTVEMEWELKKENSKRWNPEIQYTNNLCDPQFVDFAPDSTGEYRTTRPIGTRYLTRPL

SEQ ID NO: 569 - protein, 724 aa, synthetic construct
MSFVDHPPDWLEEVGEGLREFLGLEAGPPKPKPNQQHQDQARGLVLPGYNYLGPGNGLDRGEPVNRADEVAREHDISYNEQLEAGDNPYLKYNHADAEFQEKLADDTSFGGNLGKAVFQAKKRVLEPFGLVEEGAKTAPTGKRIDDHFPKRKKARTEEDSKPSTSSDAEAGPSGSQQLQIPAQPASSLGADTMSAGGGGPLGDNNQGADGVGNASGDWHCDSTWMGDRVVTKSTRTWVLPSYNNHQYREIKSGSVDGSNANAYFGYSTPWGYFDFNRFHSHWSPRDWQRLINNYWGFRPRSLRVKIFNIQVKEVTVQDSTTTIANNLTSTVQVFGDDDYQLPYVVGNGTEGCLPAFPPQVFTLPQYGYATLNRDNTENPTERSSFFCLEYFPSKMLRTGNNFEFTYNFEEVPFHSSFAPSQNLFKLANPLVDQYLYRFVSTNNTGGVQFNKNLAGRYANTYKNWFPGPMGRTQGWNLGSGVNRASVIAFARTNRMELEGASYQVPPQPNGMTNNLQGSNTYALENTMIFNSQPANPGTTATYLEGNMLITSESETQPVNRVAYNVGGQMATNNQSSTTAPATGTYNLQEIVPGSVWMERDVYLQGPIWAKIPETGAHFHPSPAMGGFGLKHPPPMMLIKNTPVPGNITSFSDVPVSSFITQYSTGQVTVEMEWELKKENSKRWNPEIQYTNNLNDPQFVDFAPDSTGEYRTTRPIGTRYLTRPL

SEQ ID NO: 570 - protein, 724 aa, synthetic construct
MSFVDHPPDWLEEVGEGLREFLGLEAGPPKPKPNQQHQDQARGLVLPGYNYLGPGNGLDRGEPVNRADEVAREHDISYNEQLEAGDNPYLKYNHADAEFQEKLADDTSFGGNLGKAVFQAKKRVLEPFGLVEEGAKTAPTGKRIDDHFPKRKKARTEEDSKPSTSSDAEAGPSGSQQLQIPAQPASSLGADTMSAGGGGPLGDNNQGADGVGNASGDWHCDSTWMGDRVVTKSTRTWVLPSYNNHQYREIKSGSVDGSNANAYFGYSTPWGYFDFNRFHSHWSPRDWQRLINNYWGFRPRSLRVKIFNIQVKEVTVQDSTTTIANNLTSTVQVFGDDDYQLPYVVGNGTEGCLPAFPPQVFTLPQYGYATLNRDNTENPTERSSFFCLEYFPSKMLRTGNNFEFTYNFEEVPFHSSFAPSQNLFKLANPLVDQYLYRFVSTNNTGGVQFNKNLAGRYANTYKNWFPGPMGRTQGWNLGSGVNRASVIAFATTNRMELEGASYQVPPQPNGMTNNLQGSNTYALENTMIFNSQPANPGTTATYLEGNMLITSESETQPVNRVAYNVGGQMATNNQSSTTAPATGTYNLQEIVPGSVWMERDVYLQGPIWAKIPETGAHFHPSPAMGGFGLKHPPPMMLIKNTPVPGNITSFSDVPVSSFITQYSTGQVTVEMEWELKKENSKRWNPEIQYTNNLCDPQFVDFAPDSTGEYRTTRPIGTRYLTRPL

SEQ ID NO: 571 - protein, 724 aa, synthetic construct
MSFVDHPPDWLEEVGEGLREFLGLEAGPPKPKPNQQHQDQARGLVLPGYNYLGPGNGLDRGEPVNRADEVAREHDISYNEQLEAGDNPYLKYNHADAEFQEKLADDTSFGGNLGKAVFQAKKRVLEPFGLVEEGAKTAPTGKRIDDHFPKRKKARTEEDSKPSTSSDAEAGPSGSQQLQIPAQPASSLGADTMSAGGGGPLGDNNQGADGVGNASGDWHCDSTWMGDRVVTKSTRTWVLPSYNNHQYREIKSGSVDGSNANAYFGYSTPWGYFDFNRFHSHWSPRDWQRLINNYWGFRPRSLRVKIFNIQVKEVTVQDSTTTIANNLTSTVQVFGDDDYQLPYVVGNGTEGCLPAFPPQVFTLPQYGYATLNRDNTENPTERSSFFCLEYFPSKMLRTGNNFEFTYNFEEVPFHSSFAPSQNLFKLANPLVDQYLYRFVSTNNTGGVQFNKNLAGRYANTYKNWFPGPMGRTQGWNLGSGVNRASVSAFARTNRMELEGASYQVPPQPNGMTNNLQGSNTYALENTMIFNSQPANPGTTATYLEGNMLITSESETQPVNRVAYNVGGQMATNNQSSTTAPATGTYNLQEIVPGSVWMERDVYLQGPIWAKIPETGAHFHPSPAMGGFGLKHPPPMMLIKNTPVPGNITSFSDVPVSSFITQYSTGQVTVEMEWELKKENSKRWNPEIQYTNNLCDPQFVDFAPDSTGEYRTTRPIGTRYLTRPL

SEQ ID NO: 572 - protein, 724 aa, synthetic construct
MSFVDHPPDWLEEVGEGLREFLGLEAGPPKPKPNQQHQDQARGLVLPGYNYLGPGNGLDRGEPVNRADEVAREHDISYNEQLEAGDNPYLKYNHADAEFQEKLADDTSFGGNLGKAVFQAKKRVLEPFGLVEEGAKTAPTGKRIDDHFPKRKKARTEEDSKPSTSSDAEAGPSGSQQLQIPAQPASSLGADTMSAGGGGPLGDNNQGADGVGNASGDWHCDSTWMGDRVVTKSTRTWVLPSYNNHQYREIKSGSVDGSNANAYFGYSTPWGYFDFNRFHSHWSPRDWQRLINNYWGFRPRSLRVKIFNIQVKEVTVQDSTTTIANNLTSTVQVFGDDDYQLPYVVGNGTEGCLPAFPPQVFTLPQYGYATLNRDNTENPTERSSFFCLEYFPSKMLRTGNNFEFTYNFEEVPFHSSFAPSQNLFKLANPLVDQYLYRFVSTNNTGGVQFNKNLAGRYANTYKNWFPGPMGRTQGWNLGSGVNRASVIAFARTNRMELEGASYQVPPQPNGMTNNLQGSNTYALENTMIFNSQPANPGTTATYLEGNMLITSESETQPVNRVAYNVGGQMATNNQSSTTAPATGTYNLQEIVPGSVWMERDVYLQGPIWAKIPETGAHFHPSPAMGGFGLKHPPPMMLIKNTPVPGNITSFSDVPVSSFITQYSTGQVTVEMEWELKKENSKRWNPEIQYTNNLCDPQFVDFAPDSTGEYRTTRPIGTRYLTRPL

SEQ ID NO: 573 - protein, 724 aa, synthetic construct
MSFVDHPPDWLEEVGEGLREFLGLEAGPPKPKPNQQHQDQARGLVLPGYNYLGPGNGLDRGEPVNRADEVAREHDISYNEQLEAGDNPYLKYNHADAEFQEKLADDTSFGGNLGKAVFQAKKRVLEPFGLVEEGAKTAPTGKRIDDHFPKRKKARTEEDSKPSTSSDAEAGPSGSQQLQIPAQPASSLGADTMSAGGGGPLGDNNQGADGVGNASGDWHCDSTWMGDRVVTKSTRTWVLPSYNNHQYREIKSGSVDGSNANAYFGYSTPWGYFDFNRFHSHWSPRDWQRLINNYWGFRPRSLRVKIFNIQVKEVTVQDSTTTIANNLTSTVQVFADDDYQLPYVVGNGTEGCLPAFPPQVFTLPQYGYATLNRDNTENPTERSSFFCLEYFPSKMLRTGNNFEFTYNFEEVPFHSSFAPSQNLFKLANPLVDQYLYRFVSTNNTGGVQFNKNLAGRYANTYKNWFPGPMGRTQGWNLGSGVNRASVSAFATTNRMELEGASYQVPPQPNGMTNNLQGSNTYALENTMIFNSQPANPGTTATYLEGNMLITSESETQPVNRVAYNVGGQMATNNQSSTTAPATGTYNLQEIVPGSVWMERDVYLQGPIWAKIPETGAHFHPSPAMGGFGLKHPPPMMLIKNTPVPGNITSFSDVPVSSFITQYSTGQVTVEMEWELKKENSKRWNPEIQYTNNLNDPQFVDFAPDSTGEYRTTRPIGTRYLTRPL

SEQ ID NO: 574 - protein, 724 aa, synthetic construct
MSFVDHPPDWLEEVGEGLREFLGLEAGPPKPKPNQQHQDQARGLVLPGYNYLGPGNGLDRGEPVNRADEVAREHDISYNEQLEAGDNPYLKYNHADAEFQEKLADDTSFGGNLGKAVFQAKKRVLEPFGLVEEGAKTAPTGKRIDDHFPKRKKARTEEDSKPSTSSDAEAGPSGSQQLQIPAQPASSLGADTMSAGGGGPLGDNNQGADGVGNASGDWHCDSTWMGDRVVTKSTRTWVLPSYNNHQYREIKSGSVDGSNANAYFGYSTPWGYFDFNRFHSHWSPRDWQRLINNYWGFRPRSLRVKIFNIQVKEVTVQDSTTTIANNLTSTVQVFADDDYQLPYVVGNGTEGCLPAFPPQVFTLPQYGYATLNRDNTENPTERSSFFCLEYFPSKMLRTGNNFEFTYNFEEVPFHSSFAPSQNLFKLANPLVDQYLYRFVSTNNTGGVQFNKNLAGRYANTYKNWFPGPMGRTQGWNLGSGVNRASVIAFATTNRMELEGASYQVPPQPNGMTNNLQGSNTYALENTMIFNSQPANPGTTATYLEGNMLITSESETQPVNRVAYNVGGQMATNNQSSTTAPATGTYNLQEIVPGSVWMERDVYLQGPIWAKIPETGAHFHPSPAMGGFGLKHPPPMMLIKNTPVPGNITSFSDVPVSSFITQYSTGQVTVEMEWELKKENSKRWNPEIQYTNNLNDPQFVDFAPDSTGEYRTTRPIGTRYLTRPL

SEQ ID NO: 575 - protein, 724 aa, synthetic construct
MSFVDHPPDWLEEVGEGLREFLGLEAGPPKPKPNQQHQDQARGLVLPGYNYLGPGNGLDRGEPVNRADEVAREHDISYNEQLEAGDNPYLKYNHADAEFQEKLADDTSFGGNLGKAVFQAKKRVLEPFGLVEEGAKTAPTGKRIDDHFPKRKKARTEEDSKPSTSSDAEAGPSGSQQLQIPAQPASSLGADTMSAGGGGPLGDNNQGADGVGNASGDWHCDSTWMGDRVVTKSTRTWVLPSYNNHQYREIKSGSVDGSNANAYFGYSTPWGYFDFNRFHSHWSPRDWQRLINNYWGFRPRSLRVKIFNIQVKEVTVQDSTTTIANNLTSTVQVFADDDYQLPYVVGNGTEGCLPAFPPQVFTLPQYGYATLNRDNTENPTERSSFFCLEYFPSKMLRTGNNFEFTYNFEEVPFHSSFAPSQNLFKLANPLVDQYLYRFVSTNNTGGVQFNKNLAGRYANTYKNWFPGPMGRTQGWNLGSGVNRASVSAFARTNRMELEGASYQVPPQPNGMTNNLQGSNTYALENTMIFNSQPANPGTTATYLEGNMLITSESETQPVNRVAYNVGGQMATNNQSSTTAPATGTYNLQEIVPGSVWMERDVYLQGPIWAKIPETGAHFHPSPAMGGFGLKHPPPMMLIKNTPVPGNITSFSDVPVSSFITQYSTGQVTVEMEWELKKENSKRWNPEIQYTNNLNDPQFVDFAPDSTGEYRTTRPIGTRYLTRPL

SEQ ID NO: 576 - protein, 724 aa, synthetic construct
MSFVDHPPDWLEEVGEGLREFLGLEAGPPKPKPNQQHQDQARGLVLPGYNYLGPGNGLDRGEPVNRADEVAREHDISYNEQLEAGDNPYLKYNHADAEFQEKLADDTSFGGNLGKAVFQAKKRVLEPFGLVEEGAKTAPTGKRIDDHFPKRKKARTEEDSKPSTSSDAEAGPSGSQQLQIPAQPASSLGADTMSAGGGGPLGDNNQGADGVGNASGDWHCDSTWMGDRVVTKSTRTWVLPSYNNHQYREIKSGSVDGSNANAYFGYSTPWGYFDFNRFHSHWSPRDWQRLINNYWGFRPRSLRVKIFNIQVKEVTVQDSTTTIANNLTSTVQVFADDDYQLPYVVGNGTEGCLPAFPPQVFTLPQYGYATLNRDNTENPTERSSFFCLEYFPSKMLRTGNNFEFTYNFEEVPFHSSFAPSQNLFKLANPLVDQYLYRFVSTNNTGGVQFNKNLAGRYANTYKNWFPGPMGRTQGWNLGSGVNRASVSAFATTNRMELEGASYQVPPQPNGMTNNLQGSNTYALENTMIFNSQPANPGTTATYLEGNMLITSESETQPVNRVAYNVGGQMATNNQSSTTAPATGTYNLQEIVPGSVWMERDVYLQGPIWAKIPETGAHFHPSPAMGGFGLKHPPPMMLIKNTPVPGNITSFSDVPVSSFITQYSTGQVTVEMEWELKKENSKRWNPEIQYTNNLCDPQFVDFAPDSTGEYRTTRPIGTRYLTRPL

SEQ ID NO: 577 - protein, 724 aa, synthetic construct
MSFVDHPPDWLEEVGEGLREFLGLEAGPPKPKPNQQHQDQARGLVLPGYNYLGPGNGLDRGEPVNRADEVAREHDISYNEQLEAGDNPYLKYNHADAEFQEKLADDTSFGGNLGKAVFQAKKRVLEPFGLVEEGAKTAPTGKRIDDHFPKRKKARTEEDSKPSTSSDAEAGPSGSQQLQIPAQPASSLGADTMSAGGGGPLGDNNQGADGVGNASGDWHCDSTWMGDRVVTKSTRTWVLPSYNNHQYREIKSGSVDGSNANAYFGYSTPWGYFDFNRFHSHWSPRDWQRLINNYWGFRPRSLRVKIFNIQVKEVTVQDSTTTIANNLTSTVQVFADDDYQLPYVVGNGTEGCLPAFPPQVFTLPQYGYATLNRDNTENPTERSSFFCLEYFPSKMLRTGNNFEFTYNFEEVPFHSSFAPSQNLFKLANPLVDQYLYRFVSTNNTGGVQFNKNLAGRYANTYKNWFPGPMGRTQGWNLGSGVNRASVIAFARTNRMELEGASYQVPPQPNGMTNNLQGSNTYALENTMIFNSQPANPGTTATYLEGNMLITSESETQPVNRVAYNVGGQMATNNQSSTTAPATGTYNLQEIVPGSVWMERDVYLQGPIWAKIPETGAHFHPSPAMGGFGLKHPPPMMLIKNTPVPGNITSFSDVPVSSFITQYSTGQVTVEMEWELKKENSKRWNPEIQYTNNLNDPQFVDFAPDSTGEYRTTRPIGTRYLTRPL

SEQ ID NO: 578 - protein, 724 aa, synthetic construct
MSFVDHPPDWLEEVGEGLREFLGLEAGPPKPKPNQQHQDQARGLVLPGYNYLGPGNGLDRGEPVNRADEVAREHDISYNEQLEAGDNPYLKYNHADAEFQEKLADDTSFGGNLGKAVFQAKKRVLEPFGLVEEGAKTAPTGKRIDDHFPKRKKARTEEDSKPSTSSDAEAGPSGSQQLQIPAQPASSLGADTMSAGGGGPLGDNNQGADGVGNASGDWHCDSTWMGDRVVTKSTRTWVLPSYNNHQYREIKSGSVDGSNANAYFGYSTPWGYFDFNRFHSHWSPRDWQRLINNYWGFRPRSLRVKIFNIQVKEVTVQDSTTTIANNLTSTVQVFADDDYQLPYVVGNGTEGCLPAFPPQVFTLPQYGYATLNRDNTENPTERSSFFCLEYFPSKMLRTGNNFEFTYNFEEVPFHSSFAPSQNLFKLANPLVDQYLYRFVSTNNTGGVQFNKNLAGRYANTYKNWFPGPMGRTQGWNLGSGVNRASVIAFATTNRMELEGASYQVPPQPNGMTNNLQGSNTYALENTMIFNSQPANPGTTATYLEGNMLITSESETQPVNRVAYNVGGQMATNNQSSTTAPATGTYNLQEIVPGSVWMERDVYLQGPIWAKIPETGAHFHPSPAMGGFGLKHPPPMMLIKNTPVPGNITSFSDVPVSSFITQYSTGQVTVEMEWELKKENSKRWNPEIQYTNNLCDPQFVDFAPDSTGEYRTTRPIGTRYLTRPL

SEQ ID NO: 579 - protein, 724 aa, synthetic construct
MSFVDHPPDWLEEVGEGLREFLGLEAGPPKPKPNQQHQDQARGLVLPGYNYLGPGNGLDRGEPVNRADEVAREHDISYNEQLEAGDNPYLKYNHADAEFQEKLADDTSFGGNLGKAVFQAKKRVLEPFGLVEEGAKTAPTGKRIDDHFPKRKKARTEEDSKPSTSSDAEAGPSGSQQLQIPAQPASSLGADTMSAGGGGPLGDNNQGADGVGNASGDWHCDSTWMGDRVVTKSTRTWVLPSYNNHQYREIKSGSVDGSNANAYFGYSTPWGYFDFNRFHSHWSPRDWQRLINNYWGFRPRSLRVKIFNIQVKEVTVQDSTTTIANNLTSTVQVFADDDYQLPYVVGNGTEGCLPAFPPQVFTLPQYGYATLNRDNTENPTERSSFFCLEYFPSKMLRTGNNFEFTYNFEEVPFHSSFAPSQNLFKLANPLVDQYLYRFVSTNNTGGVQFNKNLAGRYANTYKNWFPGPMGRTQGWNLGSGVNRASVSAFARTNRMELEGASYQVPPQPNGMTNNLQGSNTYALENTMIFNSQPANPGTTATYLEGNMLITSESETQPVNRVAYNVGGQMATNNQSSTTAPATGTYNLQEIVPGSVWMERDVYLQGPIWAKIPETGAHFHPSPAMGGFGLKHPPPMMLIKNTPVPGNITSFSDVPVSSFITQYSTGQVTVEMEWELKKENSKRWNPEIQYTNNLCDPQFVDFAPDSTGEYRTTRPIGTRYLTRPL

SEQ ID NO: 580 - protein, 724 aa, synthetic construct
MSFVDHPPDWLEEVGEGLREFLGLEAGPPKPKPNQQHQDQARGLVLPGYNYLGPGNGLDRGEPVNRADEVAREHDISYNEQLEAGDNPYLKYNHADAEFQEKLADDTSFGGNLGKAVFQAKKRVLEPFGLVEEGAKTAPTGKRIDDHFPKRKKARTEEDSKPSTSSDAEAGPSGSQQLQIPAQPASSLGADTMSAGGGGPLGDNNQGADGVGNASGDWHCDSTWMGDRVVTKSTRTWVLPSYNNHQYREIKSGSVDGSNANAYFGYSTPWGYFDFNRFHSHWSPRDWQRLINNYWGFRPRSLRVKIFNIQVKEVTVQDSTTTIANNLTSTVQVFADDDYQLPYVVGNGTEGCLPAFPPQVFTLPQYGYATLNRDNTENPTERSSFFCLEYFPSKMLRTGNNFEFTYNFEEVPFHSSFAPSQNLFKLANPLVDQYLYRFVSTNNTGGVQFNKNLAGRYANTYKNWFPGPMGRTQGWNLGSGVNRASVIAFARTNRMELEGASYQVPPQPNGMTNNLQGSNTYALENTMIFNSQPANPGTTATYLEGNMLITSESETQPVNRVAYNVGGQMATNNQSSTTAPATGTYNLQEIVPGSVWMERDVYLQGPIWAKIPETGAHFHPSPAMGGFGLKHPPPMMLIKNTPVPGNITSFSDVPVSSFITQYSTGQVTVEMEWELKKENSKRWNPEIQYTNNLCDPQFVDFAPDSTGEYRTTRPIGTRYLTRPL

SEQ ID NO: 581 - protein, 736 aa, synthetic construct
MAADGYLPDWLEDNLSEGIREWWDLKPGAPKPKANQQKQDDGRGLVLPGYKYLGPFNGLDKGEPVNAADAAALEHDKAYDQQLKAGDNPYLRYNHADAEFQERLQEDTSFGGNLGRAVFQAKKRVLEPFGLVEEGAKTAPGKKRPVEQSPQEPDSSSGIGKTGQQPAKKRLNFGQTGDSESVPDPQPLGEPPATPAAVGPTTMASGGGAPMADNNEGADGVGNASGNWHCDSTWLGDRVITTSTRTWALPTYNNHLYKQISSASTGASNDNHYFGYSTPWGYFDFNRFHCHFSPRDWQRLINNNWGFRPKRLNFKLFNIQVKEVTTNDGVTTIANNLTSTVQVFGDSEYQLPYVLGSAHQGCLPPFPADVFMIPQYGYLTLNNGSQAVGRSSFYCLEYFPSQMLRTGNNFTFSYTFEDVPFHSSYAHSQSLDRLMNPLIDQYLYYLNRTQNQSGSAQNKDLLFSRGSPAGMSVQPKNWLPGPCYRQQRVSKTKTDNNNSNFTWTGASKYNLNGRESIINPGTAMASHKDDKDKFFPMSGVMIFGKESAGASNTALDNVMITDEEEIKATNPVATERFGTVAVNLQSSSTDPATGDVHVMGALPGMVWQDRDVYLQGPIWAKIPHTDGHFHPSPLMGGFGLKHPPPQILIKNTPVPANPPAEFSATKFASFITQYSTGQVSVEIEWELQKENSKRWNPEVQYTSNYAKSANVDFTVDNNGLYTEPRPIGTRYLTRPL

SEQ ID NO: 582 - protein, 736 aa, synthetic construct
MAADGYLPDWLEDNLSEGIREWWDLKPGAPKPKANQQKQDDGRGLVLPGYKYLGPFNGLDKGEPVNAADAAALEHDKAYDQQLKAGDNPYLRYNHADAEFQERLQEDTSFGGNLGRAVFQAKKRVLEPFGLVEEGAKTAPGKKRPVEQSPQEPDSSSGIGKTGQQPAKKRLNFGQTGDSESVPDPQPLGEPPATPAAVGPTTMASGGGAPMADNNEGADGVGNASGNWHCDSTWLGDRVITTSTRTWALPTYNNHLYKQISSASTGASNDNHYFGYSTPWGYFDFNRFHCHFSPRDWQRLINNNWGFRPKRLNFKLFNIQVKEVTTNDGVTTIANNLTSTVQVFGDSEYQLPYVLGSAHQGCLPPFPADVFMIPQYGYLTLNNGSQAVGRSSFYCLEYFPSQMLRTGNNFTFSYTFEDVPFHSSYAHSQSLDRLMNPLIDQYLYYLNRTQNQSGSAQNKDLLFSRGSPAGMSVQPKNWLPGPCYRQQRVSKTKTDNNNSNITWTGASKYNLNGRESIINPGTAMASHKDDKDKFFPMSGVMIFGKESAGASNTALDNVMITDEEEIKATNPVATERFGTVAVNLQSSSTDPATGDVHVMGALPGMVWQDRDVYLQGPIWAKIPHTDGHFHPSPLMGGFGLKHPPPQILIKNTPVPANPPAEFSATKFASFITQYSTGQVSVEIEWELQKENSKRWNPEVQYTSNYAKSANVDFTVDNNGLYTEPRPIGTRYLTRPL

SEQ ID NO: 583 - protein, 736 aa, synthetic construct
MAADGYLPDWLEDNLSEGIREWWDLKPGAPKPKANQQKQDDGRGLVLPGYKYLGPFNGLDKGEPVNAADAAALEHDKAYDQQLKAGDNPYLRYNHADAEFQERLQEDTSFGGNLGRAVFQAKKRVLEPFGLVEEGAKTAPGKKRPVEQSPQEPDSSSGIGKTGQQPAKKRLNFGQTGDSESVPDPQPLGEPPATPAAVGPTTMASGGGAPMADNNEGADGVGNASGNWHCDSTWLGDRVITTSTRTWALPTYNNHLYKQISSASTGASNDNHYFGYSTPWGYFDFNRFHCHFSPRDWQRLINNNWGFRPKRLNFKLFNIQVKEVTTNDGVTTIANNLTSTVQVFGDSEYQLPYVLGSAHQGCLPPFPADVFMIPQYGYLTLNNGSQAVGRSSFYCLEYFPSQMLRTGNNFTFSYTFEDVPFHSSYAHSQSLDRLMNPLIDQYLYYLNRTQNQSGSAQNKDLLFSRGSPAGMSVQPKNWLPGPCYRQQRVSKTKTDNNNSNFTWTRASKYNLNGRESIINPGTAMASHKDDKDKFFPMSGVMIFGKESAGASNTALDNVMITDEEEIKATNPVATERFGTVAVNLQSSSTDPATGDVHVMGALPGMVWQDRDVYLQGPIWAKIPHTDGHFHPSPLMGGFGLKHPPPQILIKNTPVPANPPAEFSATKFASFITQYSTGQVSVEIEWELQKENSKRWNPEVQYTSNYAKSANVDFTVDNNGLYTEPRPIGTRYLTRPL

SEQ ID NO: 584 - protein, 736 aa, synthetic construct
MAADGYLPDWLEDNLSEGIREWWDLKPGAPKPKANQQKQDDGRGLVLPGYKYLGPFNGLDKGEPVNAADAAALEHDKAYDQQLKAGDNPYLRYNHADAEFQERLQEDTSFGGNLGRAVFQAKKRVLEPFGLVEEGAKTAPGKKRPVEQSPQEPDSSSGIGKTGQQPAKKRLNFGQTGDSESVPDPQPLGEPPATPAAVGPTTMASGGGAPMADNNEGADGVGNASGNWHCDSTWLGDRVITTSTRTWALPTYNNHLYKQISSASTGASNDNHYFGYSTPWGYFDFNRFHCHFSPRDWQRLINNNWGFRPKRLNFKLFNIQVKEVTTNDGVTTIANNLTSTVQVFGDSEYQLPYVLGSAHQGCLPPFPADVFMIPQYGYLTLNNGSQAVGRSSFYCLEYFPSQMLRTGNNFTFSYTFEDVPFHSSYAHSQSLDRLMNPLIDQYLYYLNRTQNQSGSAQNKDLLFSRGSPAGMSVQPKNWLPGPCYRQQRVSKTKTDNNNSNFTWTGASKYNLNGRESIINPGTAMASHKDDKDKFFPMSGVMIFGKESAGASNTALDNVMITDEEEIKATNPVATERFGTVAVNLQSSSTDPATGDVHVMGALPGMVWQDRDVYLQGPIWAKIPHTDGHFHPSPLMGGFGLKHPPPQILIKNTPVPANPPAEFSATKFASFITQYSTGQVSVEIEWELQKENSKRWNPEVQYTSNYCKSANVDFTVDNNGLYTEPRPIGTRYLTRPL

SEQ ID NO: 585 - protein, 736 aa, synthetic construct
MAADGYLPDWLEDNLSEGIREWWDLKPGAPKPKANQQKQDDGRGLVLPGYKYLGPFNGLDKGEPVNAADAAALEHDKAYDQQLKAGDNPYLRYNHADAEFQERLQEDTSFGGNLGRAVFQAKKRVLEPFGLVEEGAKTAPGKKRPVEQSPQEPDSSSGIGKTGQQPAKKRLNFGQTGDSESVPDPQPLGEPPATPAAVGPTTMASGGGAPMADNNEGADGVGNASGNWHCDSTWLGDRVITTSTRTWALPTYNNHLYKQISSASTGASNDNHYFGYSTPWGYFDFNRFHCHFSPRDWQRLINNNWGFRPKRLNFKLFNIQVKEVTTNDGVTTIANNLTSTVQVFGDSEYQLPYVLGSAHQGCLPPFPADVFMIPQYGYLTLNNGSQAVGRSSFYCLEYFPSQMLRTGNNFTFSYTFEDVPFHSSYAHSQSLDRLMNPLIDQYLYYLNRTQNQSGSAQNKDLLFSRGSPAGMSVQPKNWLPGPCYRQQRVSKTKTDNNNSNITWTRASKYNLNGRESIINPGTAMASHKDDKDKFFPMSGVMIFGKESAGASNTALDNVMITDEEEIKATNPVATERFGTVAVNLQSSSTDPATGDVHVMGALPGMVWQDRDVYLQGPIWAKIPHTDGHFHPSPLMGGFGLKHPPPQILIKNTPVPANPPAEFSATKFASFITQYSTGQVSVEIEWELQKENSKRWNPEVQYTSNYAKSANVDFTVDNNGLYTEPRPIGTRYLTRPL

SEQ ID NO: 586 - protein, 736 aa, synthetic construct
MAADGYLPDWLEDNLSEGIREWWDLKPGAPKPKANQQKQDDGRGLVLPGYKYLGPFNGLDKGEPVNAADAAALEHDKAYDQQLKAGDNPYLRYNHADAEFQERLQEDTSFGGNLGRAVFQAKKRVLEPFGLVEEGAKTAPGKKRPVEQSPQEPDSSSGIGKTGQQPAKKRLNFGQTGDSESVPDPQPLGEPPATPAAVGPTTMASGGGAPMADNNEGADGVGNASGNWHCDSTWLGDRVITTSTRTWALPTYNNHLYKQISSASTGASNDNHYFGYSTPWGYFDFNRFHCHFSPRDWQRLINNNWGFRPKRLNFKLFNIQVKEVTTNDGVTTIANNLTSTVQVFGDSEYQLPYVLGSAHQGCLPPFPADVFMIPQYGYLTLNNGSQAVGRSSFYCLEYFPSQMLRTGNNFTFSYTFEDVPFHSSYAHSQSLDRLMNPLIDQYLYYLNRTQNQSGSAQNKDLLFSRGSPAGMSVQPKNWLPGPCYRQQRVSKTKTDNNNSNITWTGASKYNLNGRESIINPGTAMASHKDDKDKFFPMSGVMIFGKESAGASNTALDNVMITDEEEIKATNPVATERFGTVAVNLQSSSTDPATGDVHVMGALPGMVWQDRDVYLQGPIWAKIPHTDGHFHPSPLMGGFGLKHPPPQILIKNTPVPANPPAEFSATKFASFITQYSTGQVSVEIEWELQKENSKRWNPEVQYTSNYCKSANVDFTVDNNGLYTEPRPIGTRYLTRPL

SEQ ID NO: 587 - protein, 736 aa, synthetic construct
MAADGYLPDWLEDNLSEGIREWWDLKPGAPKPKANQQKQDDGRGLVLPGYKYLGPFNGLDKGEPVNAADAAALEHDKAYDQQLKAGDNPYLRYNHADAEFQERLQEDTSFGGNLGRAVFQAKKRVLEPFGLVEEGAKTAPGKKRPVEQSPQEPDSSSGIGKTGQQPAKKRLNFGQTGDSESVPDPQPLGEPPATPAAVGPTTMASGGGAPMADNNEGADGVGNASGNWHCDSTWLGDRVITTSTRTWALPTYNNHLYKQISSASTGASNDNHYFGYSTPWGYFDFNRFHCHFSPRDWQRLINNNWGFRPKRLNFKLFNIQVKEVTTNDGVTTIANNLTSTVQVFGDSEYQLPYVLGSAHQGCLPPFPADVFMIPQYGYLTLNNGSQAVGRSSFYCLEYFPSQMLRTGNNFTFSYTFEDVPFHSSYAHSQSLDRLMNPLIDQYLYYLNRTQNQSGSAQNKDLLFSRGSPAGMSVQPKNWLPGPCYRQQRVSKTKTDNNNSNFTWTRASKYNLNGRESIINPGTAMASHKDDKDKFFPMSGVMIFGKESAGASNTALDNVMITDEEEIKATNPVATERFGTVAVNLQSSSTDPATGDVHVMGALPGMVWQDRDVYLQGPIWAKIPHTDGHFHPSPLMGGFGLKHPPPQILIKNTPVPANPPAEFSATKFASFITQYSTGQVSVEIEWELQKENSKRWNPEVQYTSNYCKSANVDFTVDNNGLYTEPRPIGTRYLTRPL

SEQ ID NO: 588 - protein, 736 aa, synthetic construct
MAADGYLPDWLEDNLSEGIREWWDLKPGAPKPKANQQKQDDGRGLVLPGYKYLGPFNGLDKGEPVNAADAAALEHDKAYDQQLKAGDNPYLRYNHADAEFQERLQEDTSFGGNLGRAVFQAKKRVLEPFGLVEEGAKTAPGKKRPVEQSPQEPDSSSGIGKTGQQPAKKRLNFGQTGDSESVPDPQPLGEPPATPAAVGPTTMASGGGAPMADNNEGADGVGNASGNWHCDSTWLGDRVITTSTRTWALPTYNNHLYKQISSASTGASNDNHYFGYSTPWGYFDFNRFHCHFSPRDWQRLINNNWGFRPKRLNFKLFNIQVKEVTTNDGVTTIANNLTSTVQVFGDSEYQLPYVLGSAHQGCLPPFPADVFMIPQYGYLTLNNGSQAVGRSSFYCLEYFPSQMLRTGNNFTFSYTFEDVPFHSSYAHSQSLDRLMNPLIDQYLYYLNRTQNQSGSAQNKDLLFSRGSPAGMSVQPKNWLPGPCYRQQRVSKTKTDNNNSNITWTRASKYNLNGRESIINPGTAMASHKDDKDKFFPMSGVMIFGKESAGASNTALDNVMITDEEEIKATNPVATERFGTVAVNLQSSSTDPATGDVHVMGALPGMVWQDRDVYLQGPIWAKIPHTDGHFHPSPLMGGFGLKHPPPQILIKNTPVPANPPAEFSATKFASFITQYSTGQVSVEIEWELQKENSKRWNPEVQYTSNYCKSANVDFTVDNNGLYTEPRPIGTRYLTRPL

SEQ ID NO: 589 - protein, 736 aa, synthetic construct
MAADGYLPDWLEDNLSEGIREWWDLKPGAPKPKANQQKQDDGRGLVLPGYKYLGPFNGLDKGEPVNAADAAALEHDKAYDQQLKAGDNPYLRYNHADAEFQERLQEDTSFGGNLGRAVFQAKKRVLEPFGLVEEGAKTAPGKKRPVEQSPQEPDSSSGIGKTGQQPAKKRLNFGQTGDSESVPDPQPLGEPPATPAAVGPTTMASGGGAPMADNNEGADGVGNASGNWHCDSTWLGDRVITTSTRTWALPTYNNHLYKQISSASTGASNDNHYFGYSTPWGYFDFNRFHCHFSPRDWQRLINNNWGFRPKRLNFKLFNIQVKEVTTNDGVTTIANNLTSTVQVFSDSEYQLPYVLGSAHQGCLPPFPADVFMIPQYGYLTLNNGSQAVGRSSFYCLEYFPSQMLRTGNNFTFSYTFEDVPFHSSYAHSQSLDRLMNPLIDQYLYYLNRTQNQSGSAQNKDLLFSRGSPAGMSVQPKNWLPGPCYRQQRVSKTKTDNNNSNFTWTGASKYNLNGRESIINPGTAMASHKDDKDKFFPMSGVMIFGKESAGASNTALDNVMITDEEEIKATNPVATERFGTVAVNLQSSSTDPATGDVHVMGALPGMVWQDRDVYLQGPIWAKIPHTDGHFHPSPLMGGFGLKHPPPQILIKNTPVPANPPAEFSATKFASFITQYSTGQVSVEIEWELQKENSKRWNPEVQYTSNLAKSANVDFTVDNNGLYTEPRPIGTRYLTRPL

SEQ ID NO: 590 - protein, 736 aa, synthetic construct
MAADGYLPDWLEDNLSEGIREWWDLKPGAPKPKANQQKQDDGRGLVLPGYKYLGPFNGLDKGEPVNAADAAALEHDKAYDQQLKAGDNPYLRYNHADAEFQERLQEDTSFGGNLGRAVFQAKKRVLEPFGLVEEGAKTAPGKKRPVEQSPQEPDSSSGIGKTGQQPAKKRLNFGQTGDSESVPDPQPLGEPPATPAAVGPTTMASGGGAPMADNNEGADGVGNASGNWHCDSTWLGDRVITTSTRTWALPTYNNHLYKQISSASTGASNDNHYFGYSTPWGYFDFNRFHCHFSPRDWQRLINNNWGFRPKRLNFKLFNIQVKEVTTNDGVTTIANNLTSTVQVFSDSEYQLPYVLGSAHQGCLPPFPADVFMIPQYGYLTLNNGSQAVGRSSFYCLEYFPSQMLRTGNNFTFSYTFEDVPFHSSYAHSQSLDRLMNPLIDQYLYYLNRTQNQSGSAQNKDLLFSRGSPAGMSVQPKNWLPGPCYRQQRVSKTKTDNNNSNITWTGASKYNLNGRESIINPGTAMASHKDDKDKFFPMSGVMIFGKESAGASNTALDNVMITDEEEIKATNPVATERFGTVAVNLQSSSTDPATGDVHVMGALPGMVWQDRDVYLQGPIWAKIPHTDGHFHPSPLMGGFGLKHPPPQILIKNTPVPANPPAEFSATKFASFITQYSTGQVSVEIEWELQKENSKRWNPEVQYTSNLAKSANVDFTVDNNGLYTEPRPIGTRYLTRPL

SEQ ID NO: 591 - protein, 736 aa, synthetic construct
MAADGYLPDWLEDNLSEGIREWWDLKPGAPKPKANQQKQDDGRGLVLPGYKYLGPFNGLDKGEPVNAADAAALEHDKAYDQQLKAGDNPYLRYNHADAEFQERLQEDTSFGGNLGRAVFQAKKRVLEPFGLVEEGAKTAPGKKRPVEQSPQEPDSSSGIGKTGQQPAKKRLNFGQTGDSESVPDPQPLGEPPATPAAVGPTTMASGGGAPMADNNEGADGVGNASGNWHCDSTWLGDRVITTSTRTWALPTYNNHLYKQISSASTGASNDNHYFGYSTPWGYFDFNRFHCHFSPRDWQRLINNNWGFRPKRLNFKLFNIQVKEVTTNDGVTTIANNLTSTVQVFSDSEYQLPYVLGSAHQGCLPPFPADVFMIPQYGYLTLNNGSQAVGRSSFYCLEYFPSQMLRTGNNFTFSYTFEDVPFHSSYAHSQSLDRLMNPLIDQYLYYLNRTQNQSGSAQNKDLLFSRGSPAGMSVQPKNWLPGPCYRQQRVSKTKTDNNNSNFTWTRASKYNLNGRESIINPGTAMASHKDDKDKFFPMSGVMIFGKESAGASNTALDNVMITDEEEIKATNPVATERFGTVAVNLQSSSTDPATGDVHVMGALPGMVWQDRDVYLQGPIWAKIPHTDGHFHPSPLMGGFGLKHPPPQILIKNTPVPANPPAEFSATKFASFITQYSTGQVSVEIEWELQKENSKRWNPEVQYTSNLAKSANVDFTVDNNGLYTEPRPIGTRYLTRPL

SEQ ID NO: 592 - protein, 736 aa, synthetic construct
MAADGYLPDWLEDNLSEGIREWWDLKPGAPKPKANQQKQDDGRGLVLPGYKYLGPFNGLDKGEPVNAADAAALEHDKAYDQQLKAGDNPYLRYNHADAEFQERLQEDTSFGGNLGRAVFQAKKRVLEPFGLVEEGAKTAPGKKRPVEQSPQEPDSSSGIGKTGQQPAKKRLNFGQTGDSESVPDPQPLGEPPATPAAVGPTTMASGGGAPMADNNEGADGVGNASGNWHCDSTWLGDRVITTSTRTWALPTYNNHLYKQISSASTGASNDNHYFGYSTPWGYFDFNRFHCHFSPRDWQRLINNNWGFRPKRLNFKLFNIQVKEVTTNDGVTTIANNLTSTVQVFSDSEYQLPYVLGSAHQGCLPPFPADVFMIPQYGYLTLNNGSQAVGRSSFYCLEYFPSQMLRTGNNFTFSYTFEDVPFHSSYAHSQSLDRLMNPLIDQYLYYLNRTQNQSGSAQNKDLLFSRGSPAGMSVQPKNWLPGPCYRQQRVSKTKTDNNNSNFTWTGASKYNLNGRESIINPGTAMASHKDDKDKFFPMSGVMIFGKESAGASNTALDNVMITDEEEIKATNPVATERFGTVAVNLQSSSTDPATGDVHVMGALPGMVWQDRDVYLQGPIWAKIPHTDGHFHPSPLMGGFGLKHPPPQILIKNTPVPANPPAEFSATKFASFITQYSTGQVSVEIEWELQKENSKRWNPEVQYTSNLCKSANVDFTVDNNGLYTEPRPIGTRYLTRPL

SEQ ID NO: 593 - protein, 736 aa, synthetic construct
MAADGYLPDWLEDNLSEGIREWWDLKPGAPKPKANQQKQDDGRGLVLPGYKYLGPFNGLDKGEPVNAADAAALEHDKAYDQQLKAGDNPYLRYNHADAEFQERLQEDTSFGGNLGRAVFQAKKRVLEPFGLVEEGAKTAPGKKRPVEQSPQEPDSSSGIGKTGQQPAKKRLNFGQTGDSESVPDPQPLGEPPATPAAVGPTTMASGGGAPMADNNEGADGVGNASGNWHCDSTWLGDRVITTSTRTWALPTYNNHLYKQISSASTGASNDNHYFGYSTPWGYFDFNRFHCHFSPRDWQRLINNNWGFRPKRLNFKLFNIQVKEVTTNDGVTTIANNLTSTVQVFSDSEYQLPYVLGSAHQGCLPPFPADVFMIPQYGYLTLNNGSQAVGRSSFYCLEYFPSQMLRTGNNFTFSYTFEDVPFHSSYAHSQSLDRLMNPLIDQYLYYLNRTQNQSGSAQNKDLLFSRGSPAGMSVQPKNWLPGPCYRQQRVSKTKTDNNNSNITWTRASKYNLNGRESIINPGTAMASHKDDKDKFFPMSGVMIFGKESAGASNTALDNVMITDEEEIKATNPVATERFGTVAVNLQSSSTDPATGDVHVMGALPGMVWQDRDVYLQGPIWAKIPHTDGHFHPSPLMGGFGLKHPPPQILIKNTPVPANPPAEFSATKFASFITQYSTGQVSVEIEWELQKENSKRWNPEVQYTSNLAKSANVDFTVDNNGLYTEPRPIGTRYLTRPL

SEQ ID NO: 594 - protein, 736 aa, synthetic construct
MAADGYLPDWLEDNLSEGIREWWDLKPGAPKPKANQQKQDDGRGLVLPGYKYLGPFNGLDKGEPVNAADAAALEHDKAYDQQLKAGDNPYLRYNHADAEFQERLQEDTSFGGNLGRAVFQAKKRVLEPFGLVEEGAKTAPGKKRPVEQSPQEPDSSSGIGKTGQQPAKKRLNFGQTGDSESVPDPQPLGEPPATPAAVGPTTMASGGGAPMADNNEGADGVGNASGNWHCDSTWLGDRVITTSTRTWALPTYNNHLYKQISSASTGASNDNHYFGYSTPWGYFDFNRFHCHFSPRDWQRLINNNWGFRPKRLNFKLFNIQVKEVTTNDGVTTIANNLTSTVQVFSDSEYQLPYVLGSAHQGCLPPFPADVFMIPQYGYLTLNNGSQAVGRSSFYCLEYFPSQMLRTGNNFTFSYTFEDVPFHSSYAHSQSLDRLMNPLIDQYLYYLNRTQNQSGSAQNKDLLFSRGSPAGMSVQPKNWLPGPCYRQQRVSKTKTDNNNSNITWTGASKYNLNGRESIINPGTAMASHKDDKDKFFPMSGVMIFGKESAGASNTALDNVMITDEEEIKATNPVATERFGTVAVNLQSSSTDPATGDVHVMGALPGMVWQDRDVYLQGPIWAKIPHTDGHFHPSPLMGGFGLKHPPPQILIKNTPVPANPPAEFSATKFASFITQYSTGQVSVEIEWELQKENSKRWNPEVQYTSNLCKSANVDFTVDNNGLYTEPRPIGTRYLTRPL

SEQ ID NO: 595 - protein, 736 aa, synthetic construct
MAADGYLPDWLEDNLSEGIREWWDLKPGAPKPKANQQKQDDGRGLVLPGYKYLGPFNGLDKGEPVNAADAAALEHDKAYDQQLKAGDNPYLRYNHADAEFQERLQEDTSFGGNLGRAVFQAKKRVLEPFGLVEEGAKTAPGKKRPVEQSPQEPDSSSGIGKTGQQPAKKRLNFGQTGDSESVPDPQPLGEPPATPAAVGPTTMASGGGAPMADNNEGADGVGNASGNWHCDSTWLGDRVITTSTRTWALPTYNNHLYKQISSASTGASNDNHYFGYSTPWGYFDFNRFHCHFSPRDWQRLINNNWGFRPKRLNFKLFNIQVKEVTTNDGVTTIANNLTSTVQVFSDSEYQLPYVLGSAHQGCLPPFPADVFMIPQYGYLTLNNGSQAVGRSSFYCLEYFPSQMLRTGNNFTFSYTFEDVPFHSSYAHSQSLDRLMNPLIDQYLYYLNRTQNQSGSAQNKDLLFSRGSPAGMSVQPKNWLPGPCYRQQRVSKTKTDNNNSNFTWTRASKYNLNGRESIINPGTAMASHKDDKDKFFPMSGVMIFGKESAGASNTALDNVMITDEEEIKATNPVATERFGTVAVNLQSSSTDPATGDVHVMGALPGMVWQDRDVYLQGPIWAKIPHTDGHFHPSPLMGGFGLKHPPPQILIKNTPVPANPPAEFSATKFASFITQYSTGQVSVEIEWELQKENSKRWNPEVQYTSNLCKSANVDFTVDNNGLYTEPRPIGTRYLTRPL

SEQ ID NO: 596 - protein, 736 aa, synthetic construct
MAADGYLPDWLEDNLSEGIREWWDLKPGAPKPKANQQKQDDGRGLVLPGYKYLGPFNGLDKGEPVNAADAAALEHDKAYDQQLKAGDNPYLRYNHADAEFQERLQEDTSFGGNLGRAVFQAKKRVLEPFGLVEEGAKTAPGKKRPVEQSPQEPDSSSGIGKTGQQPAKKRLNFGQTGDSESVPDPQPLGEPPATPAAVGPTTMASGGGAPMADNNEGADGVGNASGNWHCDSTWLGDRVITTSTRTWALPTYNNHLYKQISSASTGASNDNHYFGYSTPWGYFDFNRFHCHFSPRDWQRLINNNWGFRPKRLNFKLFNIQVKEVTTNDGVTTIANNLTSTVQVFSDSEYQLPYVLGSAHQGCLPPFPADVFMIPQYGYLTLNNGSQAVGRSSFYCLEYFPSQMLRTGNNFTFSYTFEDVPFHSSYAHSQSLDRLMNPLIDQYLYYLNRTQNQSGSAQNKDLLFSRGSPAGMSVQPKNWLPGPCYRQQRVSKTKTDNNNSNITWTRASKYNLNGRESIINPGTAMASHKDDKDKFFPMSGVMIFGKESAGASNTALDNVMITDEEEIKATNPVATERFGTVAVNLQSSSTDPATGDVHVMGALPGMVWQDRDVYLQGPIWAKIPHTDGHFHPSPLMGGFGLKHPPPQILIKNTPVPANPPAEFSATKFASFITQYSTGQVSVEIEWELQKENSKRWNPEVQYTSNLCKSANVDFTVDNNGLYTEPRPIGTRYLTRPL

SEQ ID NO: 597 - protein, 736 aa, synthetic construct
MAADGYLPDWLEDNLSEGIREWWDLKPGAPKPKANQQKQDDGRGLVLPGYKYLGPFNGLDKGEPVNAADAAALEHDKAYDQQLKAGDNPYLRYNHADAEFQERLQEDTSFGGNLGRAVFQAKKRVLEPFGLVEEGAKTAPGKKRPVEQSPQEPDSSSGIGKTGQQPAKKRLNFGQTGDSESVPDPQPLGEPPATPAAVGPTTMASGGGAPMADNNEGADGVGNASGNWHCDSTWLGDRVITTSTRTWALPTYNNHLYKQISSASTGASNDNHYFGYSTPWGYFDFNRFHCHFSPRDWQRLINNNWGFRPKRLNFKLFNIQVKEVTTNDGVTTIANNLTSTVQVFGDSEYQLPYVLGSAHQGCLPPFPADVFMIPQYGYLTLNNGSQAVGRSSFYCLEYFPSQMLRTGNNFTFSYTFEDVPFHSSYAHSQSLDRLMNPLIDQYLYYLNRTQNQSGSAQNKDLLFSRGSPAGMSVQPKNWLPGPCYRQQRVSKTKTDNNNSNFTWTGASKYNLNGRESIINPGTAMASHKDDKDKFFPMSGVMIFGKESAGASNTALDNVMITDEEEIKATNPVATERFGTVAVNLQSSSTDPATGDVHVMGALPGMVWQDRDVYLQGPIWAKIPHTDGHFHPSPLMGGFGLKHPPPQILIKNTPVPANPPAEFSATKFASFITQYSTGQVSVEIEWELQKENSKRWNPEVQYTSNLAKSANVDFTVDNNGLYTEPRPIGTRYLTRPL

SEQ ID NO: 598 - protein, 736 aa, synthetic construct
MAADGYLPDWLEDNLSEGIREWWDLKPGAPKPKANQQKQDDGRGLVLPGYKYLGPFNGLDKGEPVNAADAAALEHDKAYDQQLKAGDNPYLRYNHADAEFQERLQEDTSFGGNLGRAVFQAKKRVLEPFGLVEEGAKTAPGKKRPVEQSPQEPDSSSGIGKTGQQPAKKRLNFGQTGDSESVPDPQPLGEPPATPAAVGPTTMASGGGAPMADNNEGADGVGNASGNWHCDSTWLGDRVITTSTRTWALPTYNNHLYKQISSASTGASNDNHYFGYSTPWGYFDFNRFHCHFSPRDWQRLINNNWGFRPKRLNFKLFNIQVKEVTTNDGVTTIANNLTSTVQVFGDSEYQLPYVLGSAHQGCLPPFPADVFMIPQYGYLTLNNGSQAVGRSSFYCLEYFPSQMLRTGNNFTFSYTFEDVPFHSSYAHSQSLDRLMNPLIDQYLYYLNRTQNQSGSAQNKDLLFSRGSPAGMSVQPKNWLPGPCYRQQRVSKTKTDNNNSNITWTGASKYNLNGRESIINPGTAMASHKDDKDKFFPMSGVMIFGKESAGASNTALDNVMITDEEEIKATNPVATERFGTVAVNLQSSSTDPATGDVHVMGALPGMVWQDRDVYLQGPIWAKIPHTDGHFHPSPLMGGFGLKHPPPQILIKNTPVPANPPAEFSATKFASFITQYSTGQVSVEIEWELQKENSKRWNPEVQYTSNLAKSANVDFTVDNNGLYTEPRPIGTRYLTRPL

SEQ ID NO: 599 - protein, 736 aa, synthetic construct
MAADGYLPDWLEDNLSEGIREWWDLKPGAPKPKANQQKQDDGRGLVLPGYKYLGPFNGLDKGEPVNAADAAALEHDKAYDQQLKAGDNPYLRYNHADAEFQERLQEDTSFGGNLGRAVFQAKKRVLEPFGLVEEGAKTAPGKKRPVEQSPQEPDSSSGIGKTGQQPAKKRLNFGQTGDSESVPDPQPLGEPPATPAAVGPTTMASGGGAPMADNNEGADGVGNASGNWHCDSTWLGDRVITTSTRTWALPTYNNHLYKQISSASTGASNDNHYFGYSTPWGYFDFNRFHCHFSPRDWQRLINNNWGFRPKRLNFKLFNIQVKEVTTNDGVTTIANNLTSTVQVFGDSEYQLPYVLGSAHQGCLPPFPADVFMIPQYGYLTLNNGSQAVGRSSFYCLEYFPSQMLRTGNNFTFSYTFEDVPFHSSYAHSQSLDRLMNPLIDQYLYYLNRTQNQSGSAQNKDLLFSRGSPAGMSVQPKNWLPGPCYRQQRVSKTKTDNNNSNFTWTRASKYNLNGRESIINPGTAMASHKDDKDKFFPMSGVMIFGKESAGASNTALDNVMITDEEEIKATNPVATERFGTVAVNLQSSSTDPATGDVHVMGALPGMVWQDRDVYLQGPIWAKIPHTDGHFHPSPLMGGFGLKHPPPQILIKNTPVPANPPAEFSATKFASFITQYSTGQVSVEIEWELQKENSKRWNPEVQYTSNLAKSANVDFTVDNNGLYTEPRPIGTRYLTRPL

SEQ ID NO: 600 - protein, 736 aa, synthetic construct
MAADGYLPDWLEDNLSEGIREWWDLKPGAPKPKANQQKQDDGRGLVLPGYKYLGPFNGLDKGEPVNAADAAALEHDKAYDQQLKAGDNPYLRYNHADAEFQERLQEDTSFGGNLGRAVFQAKKRVLEPFGLVEEGAKTAPGKKRPVEQSPQEPDSSSGIGKTGQQPAKKRLNFGQTGDSESVPDPQPLGEPPATPAAVGPTTMASGGGAPMADNNEGADGVGNASGNWHCDSTWLGDRVITTSTRTWALPTYNNHLYKQISSASTGASNDNHYFGYSTPWGYFDFNRFHCHFSPRDWQRLINNNWGFRPKRLNFKLFNIQVKEVTTNDGVTTIANNLTSTVQVFGDSEYQLPYVLGSAHQGCLPPFPADVFMIPQYGYLTLNNGSQAVGRSSFYCLEYFPSQMLRTGNNFTFSYTFEDVPFHSSYAHSQSLDRLMNPLIDQYLYYLNRTQNQSGSAQNKDLLFSRGSPAGMSVQPKNWLPGPCYRQQRVSKTKTDNNNSNFTWTGASKYNLNGRESIINPGTAMASHKDDKDKFFPMSGVMIFGKESAGASNTALDNVMITDEEEIKATNPVATERFGTVAVNLQSSSTDPATGDVHVMGALPGMVWQDRDVYLQGPIWAKIPHTDGHFHPSPLMGGFGLKHPPPQILIKNTPVPANPPAEFSATKFASFITQYSTGQVSVEIEWELQKENSKRWNPEVQYTSNLCKSANVDFTVDNNGLYTEPRPIGTRYLTRPL

SEQ ID NO: 601 - protein, 736 aa, synthetic construct
MAADGYLPDWLEDNLSEGIREWWDLKPGAPKPKANQQKQDDGRGLVLPGYKYLGPFNGLDKGEPVNAADAAALEHDKAYDQQLKAGDNPYLRYNHADAEFQERLQEDTSFGGNLGRAVFQAKKRVLEPFGLVEEGAKTAPGKKRPVEQSPQEPDSSSGIGKTGQQPAKKRLNFGQTGDSESVPDPQPLGEPPATPAAVGPTTMASGGGAPMADNNEGADGVGNASGNWHCDSTWLGDRVITTSTRTWALPTYNNHLYKQISSASTGASNDNHYFGYSTPWGYFDFNRFHCHFSPRDWQRLINNNWGFRPKRLNFKLFNIQVKEVTTNDGVTTIANNLTSTVQVFGDSEYQLPYVLGSAHQGCLPPFPADVFMIPQYGYLTLNNGSQAVGRSSFYCLEYFPSQMLRTGNNFTFSYTFEDVPFHSSYAHSQSLDRLMNPLIDQYLYYLNRTQNQSGSAQNKDLLFSRGSPAGMSVQPKNWLPGPCYRQQRVSKTKTDNNNSNITWTRASKYNLNGRESIINPGTAMASHKDDKDKFFPMSGVMIFGKESAGASNTALDNVMITDEEEIKATNPVATERFGTVAVNLQSSSTDPATGDVHVMGALPGMVWQDRDVYLQGPIWAKIPHTDGHFHPSPLMGGFGLKHPPPQILIKNTPVPANPPAEFSATKFASFITQYSTGQVSVEIEWELQKENSKRWNPEVQYTSNLAKSANVDFTVDNNGLYTEPRPIGTRYLTRPL

SEQ ID NO: 602 - protein, 736 aa, synthetic construct
MAADGYLPDWLEDNLSEGIREWWDLKPGAPKPKANQQKQDDGRGLVLPGYKYLGPFNGLDKGEPVNAADAAALEHDKAYDQQLKAGDNPYLRYNHADAEFQERLQEDTSFGGNLGRAVFQAKKRVLEPFGLVEEGAKTAPGKKRPVEQSPQEPDSSSGIGKTGQQPAKKRLNFGQTGDSESVPDPQPLGEPPATPAAVGPTTMASGGGAPMADNNEGADGVGNASGNWHCDSTWLGDRVITTSTRTWALPTYNNHLYKQISSASTGASNDNHYFGYSTPWGYFDFNRFHCHFSPRDWQRLINNNWGFRPKRLNFKLFNIQVKEVTTNDGVTTIANNLTSTVQVFGDSEYQLPYVLGSAHQGCLPPFPADVFMIPQYGYLTLNNGSQAVGRSSFYCLEYFPSQMLRTGNNFTFSYTFEDVPFHSSYAHSQSLDRLMNPLIDQYLYYLNRTQNQSGSAQNKDLLFSRGSPAGMSVQPKNWLPGPCYRQQRVSKTKTDNNNSNITWTGASKYNLNGRESIINPGTAMASHKDDKDKFFPMSGVMIFGKESAGASNTALDNVMITDEEEIKATNPVATERFGTVAVNLQSSSTDPATGDVHVMGALPGMVWQDRDVYLQGPIWAKIPHTDGHFHPSPLMGGFGLKHPPPQILIKNTPVPANPPAEFSATKFASFITQYSTGQVSVEIEWELQKENSKRWNPEVQYTSNLCKSANVDFTVDNNGLYTEPRPIGTRYLTRPL

SEQ ID NO: 603 - protein, 736 aa, synthetic construct
MAADGYLPDWLEDNLSEGIREWWDLKPGAPKPKANQQKQDDGRGLVLPGYKYLGPFNGLDKGEPVNAADAAALEHDKAYDQQLKAGDNPYLRYNHADAEFQERLQEDTSFGGNLGRAVFQAKKRVLEPFGLVEEGAKTAPGKKRPVEQSPQEPDSSSGIGKTGQQPAKKRLNFGQTGDSESVPDPQPLGEPPATPAAVGPTTMASGGGAPMADNNEGADGVGNASGNWHCDSTWLGDRVITTSTRTWALPTYNNHLYKQISSASTGASNDNHYFGYSTPWGYFDFNRFHCHFSPRDWQRLINNNWGFRPKRLNFKLFNIQVKEVTTNDGVTTIANNLTSTVQVFGDSEYQLPYVLGSAHQGCLPPFPADVFMIPQYGYLTLNNGSQAVGRSSFYCLEYFPSQMLRTGNNFTFSYTFEDVPFHSSYAHSQSLDRLMNPLIDQYLYYLNRTQNQSGSAQNKDLLFSRGSPAGMSVQPKNWLPGPCYRQQRVSKTKTDNNNSNFTWTRASKYNLNGRESIINPGTAMASHKDDKDKFFPMSGVMIFGKESAGASNTALDNVMITDEEEIKATNPVATERFGTVAVNLQSSSTDPATGDVHVMGALPGMVWQDRDVYLQGPIWAKIPHTDGHFHPSPLMGGFGLKHPPPQILIKNTPVPANPPAEFSATKFASFITQYSTGQVSVEIEWELQKENSKRWNPEVQYTSNLCKSANVDFTVDNNGLYTEPRPIGTRYLTRPL

SEQ ID NO: 604 - protein, 736 aa, synthetic construct
MAADGYLPDWLEDNLSEGIREWWDLKPGAPKPKANQQKQDDGRGLVLPGYKYLGPFNGLDKGEPVNAADAAALEHDKAYDQQLKAGDNPYLRYNHADAEFQERLQEDTSFGGNLGRAVFQAKKRVLEPFGLVEEGAKTAPGKKRPVEQSPQEPDSSSGIGKTGQQPAKKRLNFGQTGDSESVPDPQPLGEPPATPAAVGPTTMASGGGAPMADNNEGADGVGNASGNWHCDSTWLGDRVITTSTRTWALPTYNNHLYKQISSASTGASNDNHYFGYSTPWGYFDFNRFHCHFSPRDWQRLINNNWGFRPKRLNFKLFNIQVKEVTTNDGVTTIANNLTSTVQVFGDSEYQLPYVLGSAHQGCLPPFPADVFMIPQYGYLTLNNGSQAVGRSSFYCLEYFPSQMLRTGNNFTFSYTFEDVPFHSSYAHSQSLDRLMNPLIDQYLYYLNRTQNQSGSAQNKDLLFSRGSPAGMSVQPKNWLPGPCYRQQRVSKTKTDNNNSNITWTRASKYNLNGRESIINPGTAMASHKDDKDKFFPMSGVMIFGKESAGASNTALDNVMITDEEEIKATNPVATERFGTVAVNLQSSSTDPATGDVHVMGALPGMVWQDRDVYLQGPIWAKIPHTDGHFHPSPLMGGFGLKHPPPQILIKNTPVPANPPAEFSATKFASFITQYSTGQVSVEIEWELQKENSKRWNPEVQYTSNLCKSANVDFTVDNNGLYTEPRPIGTRYLTRPL

SEQ ID NO: 605 - protein, 736 aa, synthetic construct
MAADGYLPDWLEDNLSEGIREWWDLKPGAPKPKANQQKQDDGRGLVLPGYKYLGPFNGLDKGEPVNAADAAALEHDKAYDQQLKAGDNPYLRYNHADAEFQERLQEDTSFGGNLGRAVFQAKKRVLEPFGLVEEGAKTAPGKKRPVEQSPQEPDSSSGIGKTGQQPAKKRLNFGQTGDSESVPDPQPLGEPPATPAAVGPTTMASGGGAPMADNNEGADGVGNASGNWHCDSTWLGDRVITTSTRTWALPTYNNHLYKQISSASTGASNDNHYFGYSTPWGYFDFNRFHCHFSPRDWQRLINNNWGFRPKRLNFKLFNIQVKEVTTNDGVTTIANNLTSTVQVFADSEYQLPYVLGSAHQGCLPPFPADVFMIPQYGYLTLNNGSQAVGRSSFYCLEYFPSQMLRTGNNFTFSYTFEDVPFHSSYAHSQSLDRLMNPLIDQYLYYLNRTQNQSGSAQNKDLLFSRGSPAGMSVQPKNWLPGPCYRQQRVSKTKTDNNNSNFTWTGASKYNLNGRESIINPGTAMASHKDDKDKFFPMSGVMIFGKESAGASNTALDNVMITDEEEIKATNPVATERFGTVAVNLQSSSTDPATGDVHVMGALPGMVWQDRDVYLQGPIWAKIPHTDGHFHPSPLMGGFGLKHPPPQILIKNTPVPANPPAEFSATKFASFITQYSTGQVSVEIEWELQKENSKRWNPEVQYTSNLAKSANVDFTVDNNGLYTEPRPIGTRYLTRPL

SEQ ID NO: 606 - protein, 736 aa, synthetic construct
MAADGYLPDWLEDNLSEGIREWWDLKPGAPKPKANQQKQDDGRGLVLPGYKYLGPFNGLDKGEPVNAADAAALEHDKAYDQQLKAGDNPYLRYNHADAEFQERLQEDTSFGGNLGRAVFQAKKRVLEPFGLVEEGAKTAPGKKRPVEQSPQEPDSSSGIGKTGQQPAKKRLNFGQTGDSESVPDPQPLGEPPATPAAVGPTTMASGGGAPMADNNEGADGVGNASGNWHCDSTWLGDRVITTSTRTWALPTYNNHLYKQISSASTGASNDNHYFGYSTPWGYFDFNRFHCHFSPRDWQRLINNNWGFRPKRLNFKLFNIQVKEVTTNDGVTTIANNLTSTVQVFADSEYQLPYVLGSAHQGCLPPFPADVFMIPQYGYLTLNNGSQAVGRSSFYCLEYFPSQMLRTGNNFTFSYTFEDVPFHSSYAHSQSLDRLMNPLIDQYLYYLNRTQNQSGSAQNKDLLFSRGSPAGMSVQPKNWLPGPCYRQQRVSKTKTDNNNSNITWTGASKYNLNGRESIINPGTAMASHKDDKDKFFPMSGVMIFGKESAGASNTALDNVMITDEEEIKATNPVATERFGTVAVNLQSSSTDPATGDVHVMGALPGMVWQDRDVYLQGPIWAKIPHTDGHFHPSPLMGGFGLKHPPPQILIKNTPVPANPPAEFSATKFASFITQYSTGQVSVEIEWELQKENSKRWNPEVQYTSNLAKSANVDFTVDNNGLYTEPRPIGTRYLTRPL

SEQ ID NO: 607 - protein, 736 aa, synthetic construct
MAADGYLPDWLEDNLSEGIREWWDLKPGAPKPKANQQKQDDGRGLVLPGYKYLGPFNGLDKGEPVNAADAAALEHDKAYDQQLKAGDNPYLRYNHADAEFQERLQEDTSFGGNLGRAVFQAKKRVLEPFGLVEEGAKTAPGKKRPVEQSPQEPDSSSGIGKTGQQPAKKRLNFGQTGDSESVPDPQPLGEPPATPAAVGPTTMASGGGAPMADNNEGADGVGNASGNWHCDSTWLGDRVITTSTRTWALPTYNNHLYKQISSASTGASNDNHYFGYSTPWGYFDFNRFHCHFSPRDWQRLINNNWGFRPKRLNFKLFNIQVKEVTTNDGVTTIANNLTSTVQVFADSEYQLPYVLGSAHQGCLPPFPADVFMIPQYGYLTLNNGSQAVGRSSFYCLEYFPSQMLRTGNNFTFSYTFEDVPFHSSYAHSQSLDRLMNPLIDQYLYYLNRTQNQSGSAQNKDLLFSRGSPAGMSVQPKNWLPGPCYRQQRVSKTKTDNNNSNFTWTRASKYNLNGRESIINPGTAMASHKDDKDKFFPMSGVMIFGKESAGASNTALDNVMITDEEEIKATNPVATERFGTVAVNLQSSSTDPATGDVHVMGALPGMVWQDRDVYLQGPIWAKIPHTDGHFHPSPLMGGFGLKHPPPQILIKNTPVPANPPAEFSATKFASFITQYSTGQVSVEIEWELQKENSKRWNPEVQYTSNLAKSANVDFTVDNNGLYTEPRPIGTRYLTRPL

SEQ ID NO: 608 - protein, 736 aa, synthetic construct
MAADGYLPDWLEDNLSEGIREWWDLKPGAPKPKANQQKQDDGRGLVLPGYKYLGPFNGLDKGEPVNAADAAALEHDKAYDQQLKAGDNPYLRYNHADAEFQERLQEDTSFGGNLGRAVFQAKKRVLEPFGLVEEGAKTAPGKKRPVEQSPQEPDSSSGIGKTGQQPAKKRLNFGQTGDSESVPDPQPLGEPPATPAAVGPTTMASGGGAPMADNNEGADGVGNASGNWHCDSTWLGDRVITTSTRTWALPTYNNHLYKQISSASTGASNDNHYFGYSTPWGYFDFNRFHCHFSPRDWQRLINNNWGFRPKRLNFKLFNIQVKEVTTNDGVTTIANNLTSTVQVFADSEYQLPYVLGSAHQGCLPPFPADVFMIPQYGYLTLNNGSQAVGRSSFYCLEYFPSQMLRTGNNFTFSYTFEDVPFHSSYAHSQSLDRLMNPLIDQYLYYLNRTQNQSGSAQNKDLLFSRGSPAGMSVQPKNWLPGPCYRQQRVSKTKTDNNNSNFTWTGASKYNLNGRESIINPGTAMASHKDDKDKFFPMSGVMIFGKESAGASNTALDNVMITDEEEIKATNPVATERFGTVAVNLQSSSTDPATGDVHVMGALPGMVWQDRDVYLQGPIWAKIPHTDGHFHPSPLMGGFGLKHPPPQILIKNTPVPANPPAEFSATKFASFITQYSTGQVSVEIEWELQKENSKRWNPEVQYTSNLCKSANVDFTVDNNGLYTEPRPIGTRYLTRPL

SEQ ID NO: 609 - protein, 736 aa, synthetic construct
MAADGYLPDWLEDNLSEGIREWWDLKPGAPKPKANQQKQDDGRGLVLPGYKYLGPFNGLDKGEPVNAADAAALEHDKAYDQQLKAGDNPYLRYNHADAEFQERLQEDTSFGGNLGRAVFQAKKRVLEPFGLVEEGAKTAPGKKRPVEQSPQEPDSSSGIGKTGQQPAKKRLNFGQTGDSESVPDPQPLGEPPATPAAVGPTTMASGGGAPMADNNEGADGVGNASGNWHCDSTWLGDRVITTSTRTWALPTYNNHLYKQISSASTGASNDNHYFGYSTPWGYFDFNRFHCHFSPRDWQRLINNNWGFRPKRLNFKLFNIQVKEVTTNDGVTTIANNLTSTVQVFADSEYQLPYVLGSAHQGCLPPFPADVFMIPQYGYLTLNNGSQAVGRSSFYCLEYFPSQMLRTGNNFTFSYTFEDVPFHSSYAHSQSLDRLMNPLIDQYLYYLNRTQNQSGSAQNKDLLFSRGSPAGMSVQPKNWLPGPCYRQQRVSKTKTDNNNSNITWTRASKYNLNGRESIINPGTAMASHKDDKDKFFPMSGVMIFGKESAGASNTALDNVMITDEEEIKATNPVATERFGTVAVNLQSSSTDPATGDVHVMGALPGMVWQDRDVYLQGPIWAKIPHTDGHFHPSPLMGGFGLKHPPPQILIKNTPVPANPPAEFSATKFASFITQYSTGQVSVEIEWELQKENSKRWNPEVQYTSNLAKSANVDFTVDNNGLYTEPRPIGTRYLTRPL

SEQ ID NO: 610 - protein, 736 aa, synthetic construct
MAADGYLPDWLEDNLSEGIREWWDLKPGAPKPKANQQKQDDGRGLVLPGYKYLGPFNGLDKGEPVNAADAAALEHDKAYDQQLKAGDNPYLRYNHADAEFQERLQEDTSFGGNLGRAVFQAKKRVLEPFGLVEEGAKTAPGKKRPVEQSPQEPDSSSGIGKTGQQPAKKRLNFGQTGDSESVPDPQPLGEPPATPAAVGPTTMASGGGAPMADNNEGADGVGNASGNWHCDSTWLGDRVITTSTRTWALPTYNNHLYKQISSASTGASNDNHYFGYSTPWGYFDFNRFHCHFSPRDWQRLINNNWGFRPKRLNFKLFNIQVKEVTTNDGVTTIANNLTSTVQVFADSEYQLPYVLGSAHQGCLPPFPADVFMIPQYGYLTLNNGSQAVGRSSFYCLEYFPSQMLRTGNNFTFSYTFEDVPFHSSYAHSQSLDRLMNPLIDQYLYYLNRTQNQSGSAQNKDLLFSRGSPAGMSVQPKNWLPGPCYRQQRVSKTKTDNNNSNITWTGASKYNLNGRESIINPGTAMASHKDDKDKFFPMSGVMIFGKESAGASNTALDNVMITDEEEIKATNPVATERFGTVAVNLQSSSTDPATGDVHVMGALPGMVWQDRDVYLQGPIWAKIPHTDGHFHPSPLMGGFGLKHPPPQILIKNTPVPANPPAEFSATKFASFITQYSTGQVSVEIEWELQKENSKRWNPEVQYTSNLCKSANVDFTVDNNGLYTEPRPIGTRYLTRPL

SEQ ID NO: 611 - protein, 736 aa, synthetic construct
MAADGYLPDWLEDNLSEGIREWWDLKPGAPKPKANQQKQDDGRGLVLPGYKYLGPFNGLDKGEPVNAADAAALEHDKAYDQQLKAGDNPYLRYNHADAEFQERLQEDTSFGGNLGRAVFQAKKRVLEPFGLVEEGAKTAPGKKRPVEQSPQEPDSSSGIGKTGQQPAKKRLNFGQTGDSESVPDPQPLGEPPATPAAVGPTTMASGGGAPMADNNEGADGVGNASGNWHCDSTWLGDRVITTSTRTWALPTYNNHLYKQISSASTGASNDNHYFGYSTPWGYFDFNRFHCHFSPRDWQRLINNNWGFRPKRLNFKLFNIQVKEVTTNDGVTTIANNLTSTVQVFADSEYQLPYVLGSAHQGCLPPFPADVFMIPQYGYLTLNNGSQAVGRSSFYCLEYFPSQMLRTGNNFTFSYTFEDVPFHSSYAHSQSLDRLMNPLIDQYLYYLNRTQNQSGSAQNKDLLFSRGSPAGMSVQPKNWLPGPCYRQQRVSKTKTDNNNSNFTWTRASKYNLNGRESIINPGTAMASHKDDKDKFFPMSGVMIFGKESAGASNTALDNVMITDEEEIKATNPVATERFGTVAVNLQSSSTDPATGDVHVMGALPGMVWQDRDVYLQGPIWAKIPHTDGHFHPSPLMGGFGLKHPPPQILIKNTPVPANPPAEFSATKFASFITQYSTGQVSVEIEWELQKENSKRWNPEVQYTSNLCKSANVDFTVDNNGLYTEPRPIGTRYLTRPL

SEQ ID NO: 612 - protein, 736 aa, synthetic construct
MAADGYLPDWLEDNLSEGIREWWDLKPGAPKPKANQQKQDDGRGLVLPGYKYLGPFNGLDKGEPVNAADAAALEHDKAYDQQLKAGDNPYLRYNHADAEFQERLQEDTSFGGNLGRAVFQAKKRVLEPFGLVEEGAKTAPGKKRPVEQSPQEPDSSSGIGKTGQQPAKKRLNFGQTGDSESVPDPQPLGEPPATPAAVGPTTMASGGGAPMADNNEGADGVGNASGNWHCDSTWLGDRVITTSTRTWALPTYNNHLYKQISSASTGASNDNHYFGYSTPWGYFDFNRFHCHFSPRDWQRLINNNWGFRPKRLNFKLFNIQVKEVTTNDGVTTIANNLTSTVQVFADSEYQLPYVLGSAHQGCLPPFPADVFMIPQYGYLTLNNGSQAVGRSSFYCLEYFPSQMLRTGNNFTFSYTFEDVPFHSSYAHSQSLDRLMNPLIDQYLYYLNRTQNQSGSAQNKDLLFSRGSPAGMSVQPKNWLPGPCYRQQRVSKTKTDNNNSNITWTRASKYNLNGRESIINPGTAMASHKDDKDKFFPMSGVMIFGKESAGASNTALDNVMITDEEEIKATNPVATERFGTVAVNLQSSSTDPATGDVHVMGALPGMVWQDRDVYLQGPIWAKIPHTDGHFHPSPLMGGFGLKHPPPQILIKNTPVPANPPAEFSATKFASFITQYSTGQVSVEIEWELQKENSKRWNPEVQYTSNLCKSANVDFTVDNNGLYTEPRPIGTRYLTRPL

SEQ ID NO: 613 - protein, 738 aa, synthetic construct
MAADGYLPDWLEDNLSEGIREWWALKPGAPKPKANQQKQDDGRGLVLPGYKYLGPFNGLDKGEPVNAADAAALEHDKAYDQQLQAGDNPYLRYNHADAEFQERLQEDTSFGGNLGRAVFQAKKRVLEPLGLVEEGAKTAPGKKRPVEPSPQRSPDSSTGIGKKGQQPARKRLNFGQTGDSESVPDPQPLGEPPAAPSGVGPNTMAAGGGAPMADNNEGADGVGSSSGNWHCDSTWLGDRVITTSTRTWALPTYNNHLYKQISNGTSGGATNDNTYFGYSTPWGYFDFNRFHCHFSPRDWQRLINNNWGFRPKRLSFKLFNIQVKEVTQNEGTKTIANNLTSTIQVFGDSEYQLPYVLGSAHQGCLPPFPADVFMIPQYGYLTLNNGSQAVGRSSFYCLEYFPSQMLRTGNNFQFTYTFEDVPFHSSYAHSQSLDRLMNPLIDQYLYYLSRTQTTGGTANTQTLGFSQGGPNTMANQAKNWLPGPCYRQQRVSTTTGQNNNSNFAWTAGTKYHLNGRNSLANPGIAMATHKDDEERFFPSNGILIFGKQNAARDNADYSDVMLTSEEEIKTTNPVATEEYGIVADNLQQQNTAPQIGTVNSQGALPGMVWQNRDVYLQGPIWAKIPHTDGNFHPSPLMGGFGLKHPPPQILIKNTPVPADPPTTFNQSKLNSFITQYSTGQVSVEIEWELQKENSKRWNPEIQYTSNYYKSTSVDFAVNTEGVYSEPRPIGTRYLTRNL

SEQ ID NO: 614 - protein, 738 aa, synthetic construct
MAADGYLPDWLEDNLSEGIREWWALKPGAPKPKANQQKQDDGRGLVLPGYKYLGPFNGLDKGEPVNAADAAALEHDKAYDQQLQAGDNPYLRYNHADAEFQERLQEDTSFGGNLGRAVFQAKKRVLEPLGLVEEGAKTAPGKKRPVEPSPQRSPDSSTGIGKKGQQPARKRLNFGQTGDSESVPDPQPLGEPPAAPSGVGPNTMAAGGGAPMADNNEGADGVGSSSGNWHCDSTWLGDRVITTSTRTWALPTYNNHLYKQISNGTSGGATNDNTYFGYSTPWGYFDFNRFHCHFSPRDWQRLINNNWGFRPKRLSFKLFNIQVKEVTQNEGTKTIANNLTSTIQVFGDSEYQLPYVLGSAHQGCLPPFPADVFMIPQYGYLTLNNGSQAVGRSSFYCLEYFPSQMLRTGNNFQFTYTFEDVPFHSSYAHSQSLDRLMNPLIDQYLYYLSRTQTTGGTANTQTLGFSQGGPNTMANQAKNWLPGPCYRQQRVSTTTGQNNNSNIAWTAGTKYHLNGRNSLANPGIAMATHKDDEERFFPSNGILIFGKQNAARDNADYSDVMLTSEEEIKTTNPVATEEYGIVADNLQQQNTAPQIGTVNSQGALPGMVWQNRDVYLQGPIWAKIPHTDGNFHPSPLMGGFGLKHPPPQILIKNTPVPADPPTTFNQSKLNSFITQYSTGQVSVEIEWELQKENSKRWNPEIQYTSNYYKSTSVDFAVNTEGVYSEPRPIGTRYLTRNL

SEQ ID NO: 615 - protein, 738 aa, synthetic construct
MAADGYLPDWLEDNLSEGIREWWALKPGAPKPKANQQKQDDGRGLVLPGYKYLGPFNGLDKGEPVNAADAAALEHDKAYDQQLQAGDNPYLRYNHADAEFQERLQEDTSFGGNLGRAVFQAKKRVLEPLGLVEEGAKTAPGKKRPVEPSPQRSPDSSTGIGKKGQQPARKRLNFGQTGDSESVPDPQPLGEPPAAPSGVGPNTMAAGGGAPMADNNEGADGVGSSSGNWHCDSTWLGDRVITTSTRTWALPTYNNHLYKQISNGTSGGATNDNTYFGYSTPWGYFDFNRFHCHFSPRDWQRLINNNWGFRPKRLSFKLFNIQVKEVTQNEGTKTIANNLTSTIQVFGDSEYQLPYVLGSAHQGCLPPFPADVFMIPQYGYLTLNNGSQAVGRSSFYCLEYFPSQMLRTGNNFQFTYTFEDVPFHSSYAHSQSLDRLMNPLIDQYLYYLSRTQTTGGTANTQTLGFSQGGPNTMANQAKNWLPGPCYRQQRVSTTTGQNNNSNFAWTRGTKYHLNGRNSLANPGIAMATHKDDEERFFPSNGILIFGKQNAARDNADYSDVMLTSEEEIKTTNPVATEEYGIVADNLQQQNTAPQIGTVNSQGALPGMVWQNRDVYLQGPIWAKIPHTDGNFHPSPLMGGFGLKHPPPQILIKNTPVPADPPTTFNQSKLNSFITQYSTGQVSVEIEWELQKENSKRWNPEIQYTSNYYKSTSVDFAVNTEGVYSEPRPIGTRYLTRNL

SEQ ID NO: 616 - protein, 738 aa, synthetic construct
MAADGYLPDWLEDNLSEGIREWWALKPGAPKPKANQQKQDDGRGLVLPGYKYLGPFNGLDKGEPVNAADAAALEHDKAYDQQLQAGDNPYLRYNHADAEFQERLQEDTSFGGNLGRAVFQAKKRVLEPLGLVEEGAKTAPGKKRPVEPSPQRSPDSSTGIGKKGQQPARKRLNFGQTGDSESVPDPQPLGEPPAAPSGVGPNTMAAGGGAPMADNNEGADGVGSSSGNWHCDSTWLGDRVITTSTRTWALPTYNNHLYKQISNGTSGGATNDNTYFGYSTPWGYFDFNRFHCHFSPRDWQRLINNNWGFRPKRLSFKLFNIQVKEVTQNEGTKTIANNLTSTIQVFGDSEYQLPYVLGSAHQGCLPPFPADVFMIPQYGYLTLNNGSQAVGRSSFYCLEYFPSQMLRTGNNFQFTYTFEDVPFHSSYAHSQSLDRLMNPLIDQYLYYLSRTQTTGGTANTQTLGFSQGGPNTMANQAKNWLPGPCYRQQRVSTTTGQNNNSNFAWTAGTKYHLNGRNSLANPGIAMATHKDDEERFFPSNGILIFGKQNAARDNADYSDVMLTSEEEIKTTNPVATEEYGIVADNLQQQNTAPQIGTVNSQGALPGMVWQNRDVYLQGPIWAKIPHTDGNFHPSPLMGGFGLKHPPPQILIKNTPVPADPPTTFNQSKLNSFITQYSTGQVSVEIEWELQKENSKRWNPEIQYTSNYCKSTSVDFAVNTEGVYSEPRPIGTRYLTRNL

SEQ ID NO: 617 - protein, 738 aa, synthetic construct
MAADGYLPDWLEDNLSEGIREWWALKPGAPKPKANQQKQDDGRGLVLPGYKYLGPFNGLDKGEPVNAADAAALEHDKAYDQQLQAGDNPYLRYNHADAEFQERLQEDTSFGGNLGRAVFQAKKRVLEPLGLVEEGAKTAPGKKRPVEPSPQRSPDSSTGIGKKGQQPARKRLNFGQTGDSESVPDPQPLGEPPAAPSGVGPNTMAAGGGAPMADNNEGADGVGSSSGNWHCDSTWLGDRVITTSTRTWALPTYNNHLYKQISNGTSGGATNDNTYFGYSTPWGYFDFNRFHCHFSPRDWQRLINNNWGFRPKRLSFKLFNIQVKEVTQNEGTKTIANNLTSTIQVFGDSEYQLPYVLGSAHQGCLPPFPADVFMIPQYGYLTLNNGSQAVGRSSFYCLEYFPSQMLRTGNNFQFTYTFEDVPFHSSYAHSQSLDRLMNPLIDQYLYYLSRTQTTGGTANTQTLGFSQGGPNTMANQAKNWLPGPCYRQQRVSTTTGQNNNSNIAWTRGTKYHLNGRNSLANPGIAMATHKDDEERFFPSNGILIFGKQNAARDNADYSDVMLTSEEEIKTTNPVATEEYGIVADNLQQQNTAPQIGTVNSQGALPGMVWQNRDVYLQGPIWAKIPHTDGNFHPSPLMGGFGLKHPPPQILIKNTPVPADPPTTFNQSKLNSFITQYSTGQVSVEIEWELQKENSKRWNPEIQYTSNYYKSTSVDFAVNTEGVYSEPRPIGTRYLTRNL

SEQ ID NO: 618 - protein, 738 aa, synthetic construct
MAADGYLPDWLEDNLSEGIREWWALKPGAPKPKANQQKQDDGRGLVLPGYKYLGPFNGLDKGEPVNAADAAALEHDKAYDQQLQAGDNPYLRYNHADAEFQERLQEDTSFGGNLGRAVFQAKKRVLEPLGLVEEGAKTAPGKKRPVEPSPQRSPDSSTGIGKKGQQPARKRLNFGQTGDSESVPDPQPLGEPPAAPSGVGPNTMAAGGGAPMADNNEGADGVGSSSGNWHCDSTWLGDRVITTSTRTWALPTYNNHLYKQISNGTSGGATNDNTYFGYSTPWGYFDFNRFHCHFSPRDWQRLINNNWGFRPKRLSFKLFNIQVKEVTQNEGTKTIANNLTSTIQVFGDSEYQLPYVLGSAHQGCLPPFPADVFMIPQYGYLTLNNGSQAVGRSSFYCLEYFPSQMLRTGNNFQFTYTFEDVPFHSSYAHSQSLDRLMNPLIDQYLYYLSRTQTTGGTANTQTLGFSQGGPNTMANQAKNWLPGPCYRQQRVSTTTGQNNNSNIAWTAGTKYHLNGRNSLANPGIAMATHKDDEERFFPSNGILIFGKQNAARDNADYSDVMLTSEEEIKTTNPVATEEYGIVADNLQQQNTAPQIGTVNSQGALPGMVWQNRDVYLQGPIWAKIPHTDGNFHPSPLMGGFGLKHPPPQILIKNTPVPADPPTTFNQSKLNSFITQYSTGQVSVEIEWELQKENSKRWNPEIQYTSNYCKSTSVDFAVNTEGVYSEPRPIGTRYLTRNL

SEQ ID NO: 619 - protein, 738 aa, synthetic construct
MAADGYLPDWLEDNLSEGIREWWALKPGAPKPKANQQKQDDGRGLVLPGYKYLGPFNGLDKGEPVNAADAAALEHDKAYDQQLQAGDNPYLRYNHADAEFQERLQEDTSFGGNLGRAVFQAKKRVLEPLGLVEEGAKTAPGKKRPVEPSPQRSPDSSTGIGKKGQQPARKRLNFGQTGDSESVPDPQPLGEPPAAPSGVGPNTMAAGGGAPMADNNEGADGVGSSSGNWHCDSTWLGDRVITTSTRTWALPTYNNHLYKQISNGTSGGATNDNTYFGYSTPWGYFDFNRFHCHFSPRDWQRLINNNWGFRPKRLSFKLFNIQVKEVTQNEGTKTIANNLTSTIQVFGDSEYQLPYVLGSAHQGCLPPFPADVFMIPQYGYLTLNNGSQAVGRSSFYCLEYFPSQMLRTGNNFQFTYTFEDVPFHSSYAHSQSLDRLMNPLIDQYLYYLSRTQTTGGTANTQTLGFSQGGPNTMANQAKNWLPGPCYRQQRVSTTTGQNNNSNFAWTRGTKYHLNGRNSLANPGIAMATHKDDEERFFPSNGILIFGKQNAARDNADYSDVMLTSEEEIKTTNPVATEEYGIVADNLQQQNTAPQIGTVNSQGALPGMVWQNRDVYLQGPIWAKIPHTDGNFHPSPLMGGFGLKHPPPQILIKNTPVPADPPTTFNQSKLNSFITQYSTGQVSVEIEWELQKENSKRWNPEIQYTSNYCKSTSVDFAVNTEGVYSEPRPIGTRYLTRNL

SEQ ID NO: 620 - protein, 738 aa, synthetic construct
MAADGYLPDWLEDNLSEGIREWWALKPGAPKPKANQQKQDDGRGLVLPGYKYLGPFNGLDKGEPVNAADAAALEHDKAYDQQLQAGDNPYLRYNHADAEFQERLQEDTSFGGNLGRAVFQAKKRVLEPLGLVEEGAKTAPGKKRPVEPSPQRSPDSSTGIGKKGQQPARKRLNFGQTGDSESVPDPQPLGEPPAAPSGVGPNTMAAGGGAPMADNNEGADGVGSSSGNWHCDSTWLGDRVITTSTRTWALPTYNNHLYKQISNGTSGGATNDNTYFGYSTPWGYFDFNRFHCHFSPRDWQRLINNNWGFRPKRLSFKLFNIQVKEVTQNEGTKTIANNLTSTIQVFGDSEYQLPYVLGSAHQGCLPPFPADVFMIPQYGYLTLNNGSQAVGRSSFYCLEYFPSQMLRTGNNFQFTYTFEDVPFHSSYAHSQSLDRLMNPLIDQYLYYLSRTQTTGGTANTQTLGFSQGGPNTMANQAKNWLPGPCYRQQRVSTTTGQNNNSNIAWTRGTKYHLNGRNSLANPGIAMATHKDDEERFFPSNGILIFGKQNAARDNADYSDVMLTSEEEIKTTNPVATEEYGIVADNLQQQNTAPQIGTVNSQGALPGMVWQNRDVYLQGPIWAKIPHTDGNFHPSPLMGGFGLKHPPPQILIKNTPVPADPPTTFNQSKLNSFITQYSTGQVSVEIEWELQKENSKRWNPEIQYTSNYCKSTSVDFAVNTEGVYSEPRPIGTRYLTRNL

SEQ ID NO: 621 - protein, 738 aa, synthetic construct
MAADGYLPDWLEDNLSEGIREWWALKPGAPKPKANQQKQDDGRGLVLPGYKYLGPFNGLDKGEPVNAADAAALEHDKAYDQQLQAGDNPYLRYNHADAEFQERLQEDTSFGGNLGRAVFQAKKRVLEPLGLVEEGAKTAPGKKRPVEPSPQRSPDSSTGIGKKGQQPARKRLNFGQTGDSESVPDPQPLGEPPAAPSGVGPNTMAAGGGAPMADNNEGADGVGSSSGNWHCDSTWLGDRVITTSTRTWALPTYNNHLYKQISNGTSGGATNDNTYFGYSTPWGYFDFNRFHCHFSPRDWQRLINNNWGFRPKRLSFKLFNIQVKEVTQNEGTKTIANNLTSTIQVFTDSEYQLPYVLGSAHQGCLPPFPADVFMIPQYGYLTLNNGSQAVGRSSFYCLEYFPSQMLRTGNNFQFTYTFEDVPFHSSYAHSQSLDRLMNPLIDQYLYYLSRTQTTGGTANTQTLGFSQGGPNTMANQAKNWLPGPCYRQQRVSTTTGQNNNSNFAWTAGTKYHLNGRNSLANPGIAMATHKDDEERFFPSNGILIFGKQNAARDNADYSDVMLTSEEEIKTTNPVATEEYGIVADNLQQQNTAPQIGTVNSQGALPGMVWQNRDVYLQGPIWAKIPHTDGNFHPSPLMGGFGLKHPPPQILIKNTPVPADPPTTFNQSKLNSFITQYSTGQVSVEIEWELQKENSKRWNPEIQYTSNLYKSTSVDFAVNTEGVYSEPRPIGTRYLTRNL

SEQ ID NO: 622 - protein, 738 aa, synthetic construct
MAADGYLPDWLEDNLSEGIREWWALKPGAPKPKANQQKQDDGRGLVLPGYKYLGPFNGLDKGEPVNAADAAALEHDKAYDQQLQAGDNPYLRYNHADAEFQERLQEDTSFGGNLGRAVFQAKKRVLEPLGLVEEGAKTAPGKKRPVEPSPQRSPDSSTGIGKKGQQPARKRLNFGQTGDSESVPDPQPLGEPPAAPSGVGPNTMAAGGGAPMADNNEGADGVGSSSGNWHCDSTWLGDRVITTSTRTWALPTYNNHLYKQISNGTSGGATNDNTYFGYSTPWGYFDFNRFHCHFSPRDWQRLINNNWGFRPKRLSFKLFNIQVKEVTQNEGTKTIANNLTSTIQVFTDSEYQLPYVLGSAHQGCLPPFPADVFMIPQYGYLTLNNGSQAVGRSSFYCLEYFPSQMLRTGNNFQFTYTFEDVPFHSSYAHSQSLDRLMNPLIDQYLYYLSRTQTTGGTANTQTLGFSQGGPNTMANQAKNWLPGPCYRQQRVSTTTGQNNNSNIAWTAGTKYHLNGRNSLANPGIAMATHKDDEERFFPSNGILIFGKQNAARDNADYSDVMLTSEEEIKTTNPVATEEYGIVADNLQQQNTAPQIGTVNSQGALPGMVWQNRDVYLQGPIWAKIPHTDGNFHPSPLMGGFGLKHPPPQILIKNTPVPADPPTTFNQSKLNSFITQYSTGQVSVEIEWELQKENSKRWNPEIQYTSNLYKSTSVDFAVNTEGVYSEPRPIGTRYLTRNL

SEQ ID NO: 623 - protein, 738 aa, synthetic construct
MAADGYLPDWLEDNLSEGIREWWALKPGAPKPKANQQKQDDGRGLVLPGYKYLGPFNGLDKGEPVNAADAAALEHDKAYDQQLQAGDNPYLRYNHADAEFQERLQEDTSFGGNLGRAVFQAKKRVLEPLGLVEEGAKTAPGKKRPVEPSPQRSPDSSTGIGKKGQQPARKRLNFGQTGDSESVPDPQPLGEPPAAPSGVGPNTMAAGGGAPMADNNEGADGVGSSSGNWHCDSTWLGDRVITTSTRTWALPTYNNHLYKQISNGTSGGATNDNTYFGYSTPWGYFDFNRFHCHFSPRDWQRLINNNWGFRPKRLSFKLFNIQVKEVTQNEGTKTIANNLTSTIQVFTDSEYQLPYVLGSAHQGCLPPFPADVFMIPQYGYLTLNNGSQAVGRSSFYCLEYFPSQMLRTGNNFQFTYTFEDVPFHSSYAHSQSLDRLMNPLIDQYLYYLSRTQTTGGTANTQTLGFSQGGPNTMANQAKNWLPGPCYRQQRVSTTTGQNNNSNFAWTRGTKYHLNGRNSLANPGIAMATHKDDEERFFPSNGILIFGKQNAARDNADYSDVMLTSEEEIKTTNPVATEEYGIVADNLQQQNTAPQIGTVNSQGALPGMVWQNRDVYLQGPIWAKIPHTDGNFHPSPLMGGFGLKHPPPQILIKNTPVPADPPTTFNQSKLNSFITQYSTGQVSVEIEWELQKENSKRWNPEIQYTSNLYKSTSVDFAVNTEGVYSEPRPIGTRYLTRNL

SEQ ID NO: 624 - protein, 738 aa, synthetic construct
MAADGYLPDWLEDNLSEGIREWWALKPGAPKPKANQQKQDDGRGLVLPGYKYLGPFNGLDKGEPVNAADAAALEHDKAYDQQLQAGDNPYLRYNHADAEFQERLQEDTSFGGNLGRAVFQAKKRVLEPLGLVEEGAKTAPGKKRPVEPSPQRSPDSSTGIGKKGQQPARKRLNFGQTGDSESVPDPQPLGEPPAAPSGVGPNTMAAGGGAPMADNNEGADGVGSSSGNWHCDSTWLGDRVITTSTRTWALPTYNNHLYKQISNGTSGGATNDNTYFGYSTPWGYFDFNRFHCHFSPRDWQRLINNNWGFRPKRLSFKLFNIQVKEVTQNEGTKTIANNLTSTIQVFTDSEYQLPYVLGSAHQGCLPPFPADVFMIPQYGYLTLNNGSQAVGRSSFYCLEYFPSQMLRTGNNFQFTYTFEDVPFHSSYAHSQSLDRLMNPLIDQYLYYLSRTQTTGGTANTQTLGFSQGGPNTMANQAKNWLPGPCYRQQRVSTTTGQNNNSNFAWTAGTKYHLNGRNSLANPGIAMATHKDDEERFFPSNGILIFGKQNAARDNADYSDVMLTSEEEIKTTNPVATEEYGIVADNLQQQNTAPQIGTVNSQGALPGMVWQNRDVYLQGPIWAKIPHTDGNFHPSPLMGGFGLKHPPPQILIKNTPVPADPPTTFNQSKLNSFITQYSTGQVSVEIEWELQKENSKRWNPEIQYTSNLCKSTSVDFAVNTEGVYSEPRPIGTRYLTRNL

SEQ ID NO: 625 - protein, 738 aa, synthetic construct
MAADGYLPDWLEDNLSEGIREWWALKPGAPKPKANQQKQDDGRGLVLPGYKYLGPFNGLDKGEPVNAADAAALEHDKAYDQQLQAGDNPYLRYNHADAEFQERLQEDTSFGGNLGRAVFQAKKRVLEPLGLVEEGAKTAPGKKRPVEPSPQRSPDSSTGIGKKGQQPARKRLNFGQTGDSESVPDPQPLGEPPAAPSGVGPNTMAAGGGAPMADNNEGADGVGSSSGNWHCDSTWLGDRVITTSTRTWALPTYNNHLYKQISNGTSGGATNDNTYFGYSTPWGYFDFNRFHCHFSPRDWQRLINNNWGFRPKRLSFKLFNIQVKEVTQNEGTKTIANNLTSTIQVFTDSEYQLPYVLGSAHQGCLPPFPADVFMIPQYGYLTLNNGSQAVGRSSFYCLEYFPSQMLRTGNNFQFTYTFEDVPFHSSYAHSQSLDRLMNPLIDQYLYYLSRTQTTGGTANTQTLGFSQGGPNTMANQAKNWLPGPCYRQQRVSTTTGQNNNSNIAWTRGTKYHLNGRNSLANPGIAMATHKDDEERFFPSNGILIFGKQNAARDNADYSDVMLTSEEEIKTTNPVATEEYGIVADNLQQQNTAPQIGTVNSQGALPGMVWQNRDVYLQGPIWAKIPHTDGNFHPSPLMGGFGLKHPPPQILIKNTPVPADPPTTFNQSKLNSFITQYSTGQVSVEIEWELQKENSKRWNPEIQYTSNLYKSTSVDFAVNTEGVYSEPRPIGTRYLTRNL

SEQ ID NO: 626 - protein, 738 aa, synthetic construct
MAADGYLPDWLEDNLSEGIREWWALKPGAPKPKANQQKQDDGRGLVLPGYKYLGPFNGLDKGEPVNAADAAALEHDKAYDQQLQAGDNPYLRYNHADAEFQERLQEDTSFGGNLGRAVFQAKKRVLEPLGLVEEGAKTAPGKKRPVEPSPQRSPDSSTGIGKKGQQPARKRLNFGQTGDSESVPDPQPLGEPPAAPSGVGPNTMAAGGGAPMADNNEGADGVGSSSGNWHCDSTWLGDRVITTSTRTWALPTYNNHLYKQISNGTSGGATNDNTYFGYSTPWGYFDFNRFHCHFSPRDWQRLINNNWGFRPKRLSFKLFNIQVKEVTQNEGTKTIANNLTSTIQVFTDSEYQLPYVLGSAHQGCLPPFPADVFMIPQYGYLTLNNGSQAVGRSSFYCLEYFPSQMLRTGNNFQFTYTFEDVPFHSSYAHSQSLDRLMNPLIDQYLYYLSRTQTTGGTANTQTLGFSQGGPNTMANQAKNWLPGPCYRQQRVSTTTGQNNNSNIAWTAGTKYHLNGRNSLANPGIAMATHKDDEERFFPSNGILIFGKQNAARDNADYSDVMLTSEEEIKTTNPVATEEYGIVADNLQQQNTAPQIGTVNSQGALPGMVWQNRDVYLQGPIWAKIPHTDGNFHPSPLMGGFGLKHPPPQILIKNTPVPADPPTTFNQSKLNSFITQYSTGQVSVEIEWELQKENSKRWNPEIQYTSNLCKSTSVDFAVNTEGVYSEPRPIGTRYLTRNL

SEQ ID NO: 627 - protein, 738 aa, synthetic construct
MAADGYLPDWLEDNLSEGIREWWALKPGAPKPKANQQKQDDGRGLVLPGYKYLGPFNGLDKGEPVNAADAAALEHDKAYDQQLQAGDNPYLRYNHADAEFQERLQEDTSFGGNLGRAVFQAKKRVLEPLGLVEEGAKTAPGKKRPVEPSPQRSPDSSTGIGKKGQQPARKRLNFGQTGDSESVPDPQPLGEPPAAPSGVGPNTMAAGGGAPMADNNEGADGVGSSSGNWHCDSTWLGDRVITTSTRTWALPTYNNHLYKQISNGTSGGATNDNTYFGYSTPWGYFDFNRFHCHFSPRDWQRLINNNWGFRPKRLSFKLFNIQVKEVTQNEGTKTIANNLTSTIQVFTDSEYQLPYVLGSAHQGCLPPFPADVFMIPQYGYLTLNNGSQAVGRSSFYCLEYFPSQMLRTGNNFQFTYTFEDVPFHSSYAHSQSLDRLMNPLIDQYLYYLSRTQTTGGTANTQTLGFSQGGPNTMANQAKNWLPGPCYRQQRVSTTTGQNNNSNFAWTRGTKYHLNGRNSLANPGIAMATHKDDEERFFPSNGILIFGKQNAARDNADYSDVMLTSEEEIKTTNPVATEEYGIVADNLQQQNTAPQIGTVNSQGALPGMVWQNRDVYLQGPIWAKIPHTDGNFHPSPLMGGFGLKHPPPQILIKNTPVPADPPTTFNQSKLNSFITQYSTGQVSVEIEWELQKENSKRWNPEIQYTSNLCKSTSVDFAVNTEGVYSEPRPIGTRYLTRNL

SEQ ID NO: 628 - protein, 738 aa, synthetic construct
MAADGYLPDWLEDNLSEGIREWWALKPGAPKPKANQQKQDDGRGLVLPGYKYLGPFNGLDKGEPVNAADAAALEHDKAYDQQLQAGDNPYLRYNHADAEFQERLQEDTSFGGNLGRAVFQAKKRVLEPLGLVEEGAKTAPGKKRPVEPSPQRSPDSSTGIGKKGQQPARKRLNFGQTGDSESVPDPQPLGEPPAAPSGVGPNTMAAGGGAPMADNNEGADGVGSSSGNWHCDSTWLGDRVITTSTRTWALPTYNNHLYKQISNGTSGGATNDNTYFGYSTPWGYFDFNRFHCHFSPRDWQRLINNNWGFRPKRLSFKLFNIQVKEVTQNEGTKTIANNLTSTIQVFTDSEYQLPYVLGSAHQGCLPPFPADVFMIPQYGYLTLNNGSQAVGRSSFYCLEYFPSQMLRTGNNFQFTYTFEDVPFHSSYAHSQSLDRLMNPLIDQYLYYLSRTQTTGGTANTQTLGFSQGGPNTMANQAKNWLPGPCYRQQRVSTTTGQNNNSNIAWTRGTKYHLNGRNSLANPGIAMATHKDDEERFFPSNGILIFGKQNAARDNADYSDVMLTSEEEIKTTNPVATEEYGIVADNLQQQNTAPQIGTVNSQGALPGMVWQNRDVYLQGPIWAKIPHTDGNFHPSPLMGGFGLKHPPPQILIKNTPVPADPPTTFNQSKLNSFITQYSTGQVSVEIEWELQKENSKRWNPEIQYTSNLCKSTSVDFAVNTEGVYSEPRPIGTRYLTRNL

SEQ ID NO: 629 - protein, 738 aa, synthetic construct
MAADGYLPDWLEDNLSEGIREWWALKPGAPKPKANQQKQDDGRGLVLPGYKYLGPFNGLDKGEPVNAADAAALEHDKAYDQQLQAGDNPYLRYNHADAEFQERLQEDTSFGGNLGRAVFQAKKRVLEPLGLVEEGAKTAPGKKRPVEPSPQRSPDSSTGIGKKGQQPARKRLNFGQTGDSESVPDPQPLGEPPAAPSGVGPNTMAAGGGAPMADNNEGADGVGSSSGNWHCDSTWLGDRVITTSTRTWALPTYNNHLYKQISNGTSGGATNDNTYFGYSTPWGYFDFNRFHCHFSPRDWQRLINNNWGFRPKRLSFKLFNIQVKEVTQNEGTKTIANNLTSTIQVFGDSEYQLPYVLGSAHQGCLPPFPADVFMIPQYGYLTLNNGSQAVGRSSFYCLEYFPSQMLRTGNNFQFTYTFEDVPFHSSYAHSQSLDRLMNPLIDQYLYYLSRTQTTGGTANTQTLGFSQGGPNTMANQAKNWLPGPCYRQQRVSTTTGQNNNSNFAWTAGTKYHLNGRNSLANPGIAMATHKDDEERFFPSNGILIFGKQNAARDNADYSDVMLTSEEEIKTTNPVATEEYGIVADNLQQQNTAPQIGTVNSQGALPGMVWQNRDVYLQGPIWAKIPHTDGNFHPSPLMGGFGLKHPPPQILIKNTPVPADPPTTFNQSKLNSFITQYSTGQVSVEIEWELQKENSKRWNPEIQYTSNLYKSTSVDFAVNTEGVYSEPRPIGTRYLTRNL

SEQ ID NO: 630 - protein, 738 aa, synthetic construct
MAADGYLPDWLEDNLSEGIREWWALKPGAPKPKANQQKQDDGRGLVLPGYKYLGPFNGLDKGEPVNAADAAALEHDKAYDQQLQAGDNPYLRYNHADAEFQERLQEDTSFGGNLGRAVFQAKKRVLEPLGLVEEGAKTAPGKKRPVEPSPQRSPDSSTGIGKKGQQPARKRLNFGQTGDSESVPDPQPLGEPPAAPSGVGPNTMAAGGGAPMADNNEGADGVGSSSGNWHCDSTWLGDRVITTSTRTWALPTYNNHLYKQISNGTSGGATNDNTYFGYSTPWGYFDFNRFHCHFSPRDWQRLINNNWGFRPKRLSFKLFNIQVKEVTQNEGTKTIANNLTSTIQVFGDSEYQLPYVLGSAHQGCLPPFPADVFMIPQYGYLTLNNGSQAVGRSSFYCLEYFPSQMLRTGNNFQFTYTFEDVPFHSSYAHSQSLDRLMNPLIDQYLYYLSRTQTTGGTANTQTLGFSQGGPNTMANQAKNWLPGPCYRQQRVSTTTGQNNNSNIAWTAGTKYHLNGRNSLANPGIAMATHKDDEERFFPSNGILIFGKQNAARDNADYSDVMLTSEEEIKTTNPVATEEYGIVADNLQQQNTAPQIGTVNSQGALPGMVWQNRDVYLQGPIWAKIPHTDGNFHPSPLMGGFGLKHPPPQILIKNTPVPADPPTTFNQSKLNSFITQYSTGQVSVEIEWELQKENSKRWNPEIQYTSNLYKSTSVDFAVNTEGVYSEPRPIGTRYLTRNL

SEQ ID NO: 631 - protein, 738 aa, synthetic construct
MAADGYLPDWLEDNLSEGIREWWALKPGAPKPKANQQKQDDGRGLVLPGYKYLGPFNGLDKGEPVNAADAAALEHDKAYDQQLQAGDNPYLRYNHADAEFQERLQEDTSFGGNLGRAVFQAKKRVLEPLGLVEEGAKTAPGKKRPVEPSPQRSPDSSTGIGKKGQQPARKRLNFGQTGDSESVPDPQPLGEPPAAPSGVGPNTMAAGGGAPMADNNEGADGVGSSSGNWHCDSTWLGDRVITTSTRTWALPTYNNHLYKQISNGTSGGATNDNTYFGYSTPWGYFDFNRFHCHFSPRDWQRLINNNWGFRPKRLSFKLFNIQVKEVTQNEGTKTIANNLTSTIQVFGDSEYQLPYVLGSAHQGCLPPFPADVFMIPQYGYLTLNNGSQAVGRSSFYCLEYFPSQMLRTGNNFQFTYTFEDVPFHSSYAHSQSLDRLMNPLIDQYLYYLSRTQTTGGTANTQTLGFSQGGPNTMANQAKNWLPGPCYRQQRVSTTTGQNNNSNFAWTRGTKYHLNGRNSLANPGIAMATHKDDEERFFPSNGILIFGKQNAARDNADYSDVMLTSEEEIKTTNPVATEEYGIVADNLQQQNTAPQIGTVNSQGALPGMVWQNRDVYLQGPIWAKIPHTDGNFHPSPLMGGFGLKHPPPQILIKNTPVPADPPTTFNQSKLNSFITQYSTGQVSVEIEWELQKENSKRWNPEIQYTSNLYKSTSVDFAVNTEGVYSEPRPIGTRYLTRNL

SEQ ID NO: 632 - protein, 738 aa, synthetic construct
MAADGYLPDWLEDNLSEGIREWWALKPGAPKPKANQQKQDDGRGLVLPGYKYLGPFNGLDKGEPVNAADAAALEHDKAYDQQLQAGDNPYLRYNHADAEFQERLQEDTSFGGNLGRAVFQAKKRVLEPLGLVEEGAKTAPGKKRPVEPSPQRSPDSSTGIGKKGQQPARKRLNFGQTGDSESVPDPQPLGEPPAAPSGVGPNTMAAGGGAPMADNNEGADGVGSSSGNWHCDSTWLGDRVITTSTRTWALPTYNNHLYKQISNGTSGGATNDNTYFGYSTPWGYFDFNRFHCHFSPRDWQRLINNNWGFRPKRLSFKLFNIQVKEVTQNEGTKTIANNLTSTIQVFGDSEYQLPYVLGSAHQGCLPPFPADVFMIPQYGYLTLNNGSQAVGRSSFYCLEYFPSQMLRTGNNFQFTYTFEDVPFHSSYAHSQSLDRLMNPLIDQYLYYLSRTQTTGGTANTQTLGFSQGGPNTMANQAKNWLPGPCYRQQRVSTTTGQNNNSNFAWTAGTKYHLNGRNSLANPGIAMATHKDDEERFFPSNGILIFGKQNAARDNADYSDVMLTSEEEIKTTNPVATEEYGIVADNLQQQNTAPQIGTVNSQGALPGMVWQNRDVYLQGPIWAKIPHTDGNFHPSPLMGGFGLKHPPPQILIKNTPVPADPPTTFNQSKLNSFITQYSTGQVSVEIEWELQKENSKRWNPEIQYTSNLCKSTSVDFAVNTEGVYSEPRPIGTRYLTRNL

SEQ ID NO: 633 - protein, 738 aa, synthetic construct
MAADGYLPDWLEDNLSEGIREWWALKPGAPKPKANQQKQDDGRGLVLPGYKYLGPFNGLDKGEPVNAADAAALEHDKAYDQQLQAGDNPYLRYNHADAEFQERLQEDTSFGGNLGRAVFQAKKRVLEPLGLVEEGAKTAPGKKRPVEPSPQRSPDSSTGIGKKGQQPARKRLNFGQTGDSESVPDPQPLGEPPAAPSGVGPNTMAAGGGAPMADNNEGADGVGSSSGNWHCDSTWLGDRVITTSTRTWALPTYNNHLYKQISNGTSGGATNDNTYFGYSTPWGYFDFNRFHCHFSPRDWQRLINNNWGFRPKRLSFKLFNIQVKEVTQNEGTKTIANNLTSTIQVFGDSEYQLPYVLGSAHQGCLPPFPADVFMIPQYGYLTLNNGSQAVGRSSFYCLEYFPSQMLRTGNNFQFTYTFEDVPFHSSYAHSQSLDRLMNPLIDQYLYYLSRTQTTGGTANTQTLGFSQGGPNTMANQAKNWLPGPCYRQQRVSTTTGQNNNSNIAWTRGTKYHLNGRNSLANPGIAMATHKDDEERFFPSNGILIFGKQNAARDNADYSDVMLTSEEEIKTTNPVATEEYGIVADNLQQQNTAPQIGTVNSQGALPGMVWQNRDVYLQGPIWAKIPHTDGNFHPSPLMGGFGLKHPPPQILIKNTPVPADPPTTFNQSKLNSFITQYSTGQVSVEIEWELQKENSKRWNPEIQYTSNLYKSTSVDFAVNTEGVYSEPRPIGTRYLTRNL

SEQ ID NO: 634 - protein, 738 aa, synthetic construct
MAADGYLPDWLEDNLSEGIREWWALKPGAPKPKANQQKQDDGRGLVLPGYKYLGPFNGLDKGEPVNAADAAALEHDKAYDQQLQAGDNPYLRYNHADAEFQERLQEDTSFGGNLGRAVFQAKKRVLEPLGLVEEGAKTAPGKKRPVEPSPQRSPDSSTGIGKKGQQPARKRLNFGQTGDSESVPDPQPLGEPPAAPSGVGPNTMAAGGGAPMADNNEGADGVGSSSGNWHCDSTWLGDRVITTSTRTWALPTYNNHLYKQISNGTSGGATNDNTYFGYSTPWGYFDFNRFHCHFSPRDWQRLINNNWGFRPKRLSFKLFNIQVKEVTQNEGTKTIANNLTSTIQVFGDSEYQLPYVLGSAHQGCLPPFPADVFMIPQYGYLTLNNGSQAVGRSSFYCLEYFPSQMLRTGNNFQFTYTFEDVPFHSSYAHSQSLDRLMNPLIDQYLYYLSRTQTTGGTANTQTLGFSQGGPNTMANQAKNWLPGPCYRQQRVSTTTGQNNNSNIAWTAGTKYHLNGRNSLANPGIAMATHKDDEERFFPSNGILIFGKQNAARDNADYSDVMLTSEEEIKTTNPVATEEYGIVADNLQQQNTAPQIGTVNSQGALPGMVWQNRDVYLQGPIWAKIPHTDGNFHPSPLMGGFGLKHPPPQILIKNTPVPADPPTTFNQSKLNSFITQYSTGQVSVEIEWELQKENSKRWNPEIQYTSNLCKSTSVDFAVNTEGVYSEPRPIGTRYLTRNL

SEQ ID NO: 635 - protein, 738 aa, synthetic construct
MAADGYLPDWLEDNLSEGIREWWALKPGAPKPKANQQKQDDGRGLVLPGYKYLGPFNGLDKGEPVNAADAAALEHDKAYDQQLQAGDNPYLRYNHADAEFQERLQEDTSFGGNLGRAVFQAKKRVLEPLGLVEEGAKTAPGKKRPVEPSPQRSPDSSTGIGKKGQQPARKRLNFGQTGDSESVPDPQPLGEPPAAPSGVGPNTMAAGGGAPMADNNEGADGVGSSSGNWHCDSTWLGDRVITTSTRTWALPTYNNHLYKQISNGTSGGATNDNTYFGYSTPWGYFDFNRFHCHFSPRDWQRLINNNWGFRPKRLSFKLFNIQVKEVTQNEGTKTIANNLTSTIQVFGDSEYQLPYVLGSAHQGCLPPFPADVFMIPQYGYLTLNNGSQAVGRSSFYCLEYFPSQMLRTGNNFQFTYTFEDVPFHSSYAHSQSLDRLMNPLIDQYLYYLSRTQTTGGTANTQTLGFSQGGPNTMANQAKNWLPGPCYRQQRVSTTTGQNNNSNFAWTRGTKYHLNGRNSLANPGIAMATHKDDEERFFPSNGILIFGKQNAARDNADYSDVMLTSEEEIKTTNPVATEEYGIVADNLQQQNTAPQIGTVNSQGALPGMVWQNRDVYLQGPIWAKIPHTDGNFHPSPLMGGFGLKHPPPQILIKNTPVPADPPTTFNQSKLNSFITQYSTGQVSVEIEWELQKENSKRWNPEIQYTSNLCKSTSVDFAVNTEGVYSEPRPIGTRYLTRNL

SEQ ID NO: 636 - protein, 738 aa, synthetic construct
MAADGYLPDWLEDNLSEGIREWWALKPGAPKPKANQQKQDDGRGLVLPGYKYLGPFNGLDKGEPVNAADAAALEHDKAYDQQLQAGDNPYLRYNHADAEFQERLQEDTSFGGNLGRAVFQAKKRVLEPLGLVEEGAKTAPGKKRPVEPSPQRSPDSSTGIGKKGQQPARKRLNFGQTGDSESVPDPQPLGEPPAAPSGVGPNTMAAGGGAPMADNNEGADGVGSSSGNWHCDSTWLGDRVITTSTRTWALPTYNNHLYKQISNGTSGGATNDNTYFGYSTPWGYFDFNRFHCHFSPRDWQRLINNNWGFRPKRLSFKLFNIQVKEVTQNEGTKTIANNLTSTIQVFGDSEYQLPYVLGSAHQGCLPPFPADVFMIPQYGYLTLNNGSQAVGRSSFYCLEYFPSQMLRTGNNFQFTYTFEDVPFHSSYAHSQSLDRLMNPLIDQYLYYLSRTQTTGGTANTQTLGFSQGGPNTMANQAKNWLPGPCYRQQRVSTTTGQNNNSNIAWTRGTKYHLNGRNSLANPGIAMATHKDDEERFFPSNGILIFGKQNAARDNADYSDVMLTSEEEIKTTNPVATEEYGIVADNLQQQNTAPQIGTVNSQGALPGMVWQNRDVYLQGPIWAKIPHTDGNFHPSPLMGGFGLKHPPPQILIKNTPVPADPPTTFNQSKLNSFITQYSTGQVSVEIEWELQKENSKRWNPEIQYTSNLCKSTSVDFAVNTEGVYSEPRPIGTRYLTRNL

SEQ ID NO: 637 - protein, 738 aa, synthetic construct
MAADGYLPDWLEDNLSEGIREWWALKPGAPKPKANQQKQDDGRGLVLPGYKYLGPFNGLDKGEPVNAADAAALEHDKAYDQQLQAGDNPYLRYNHADAEFQERLQEDTSFGGNLGRAVFQAKKRVLEPLGLVEEGAKTAPGKKRPVEPSPQRSPDSSTGIGKKGQQPARKRLNFGQTGDSESVPDPQPLGEPPAAPSGVGPNTMAAGGGAPMADNNEGADGVGSSSGNWHCDSTWLGDRVITTSTRTWALPTYNNHLYKQISNGTSGGATNDNTYFGYSTPWGYFDFNRFHCHFSPRDWQRLINNNWGFRPKRLSFKLFNIQVKEVTQNEGTKTIANNLTSTIQVFADSEYQLPYVLGSAHQGCLPPFPADVFMIPQYGYLTLNNGSQAVGRSSFYCLEYFPSQMLRTGNNFQFTYTFEDVPFHSSYAHSQSLDRLMNPLIDQYLYYLSRTQTTGGTANTQTLGFSQGGPNTMANQAKNWLPGPCYRQQRVSTTTGQNNNSNFAWTAGTKYHLNGRNSLANPGIAMATHKDDEERFFPSNGILIFGKQNAARDNADYSDVMLTSEEEIKTTNPVATEEYGIVADNLQQQNTAPQIGTVNSQGALPGMVWQNRDVYLQGPIWAKIPHTDGNFHPSPLMGGFGLKHPPPQILIKNTPVPADPPTTFNQSKLNSFITQYSTGQVSVEIEWELQKENSKRWNPEIQYTSNLYKSTSVDFAVNTEGVYSEPRPIGTRYLTRNL

SEQ ID NO: 638 - protein, 738 aa, synthetic construct
MAADGYLPDWLEDNLSEGIREWWALKPGAPKPKANQQKQDDGRGLVLPGYKYLGPFNGLDKGEPVNAADAAALEHDKAYDQQLQAGDNPYLRYNHADAEFQERLQEDTSFGGNLGRAVFQAKKRVLEPLGLVEEGAKTAPGKKRPVEPSPQRSPDSSTGIGKKGQQPARKRLNFGQTGDSESVPDPQPLGEPPAAPSGVGPNTMAAGGGAPMADNNEGADGVGSSSGNWHCDSTWLGDRVITTSTRTWALPTYNNHLYKQISNGTSGGATNDNTYFGYSTPWGYFDFNRFHCHFSPRDWQRLINNNWGFRPKRLSFKLFNIQVKEVTQNEGTKTIANNLTSTIQVFADSEYQLPYVLGSAHQGCLPPFPADVFMIPQYGYLTLNNGSQAVGRSSFYCLEYFPSQMLRTGNNFQFTYTFEDVPFHSSYAHSQSLDRLMNPLIDQYLYYLSRTQTTGGTANTQTLGFSQGGPNTMANQAKNWLPGPCYRQQRVSTTTGQNNNSNIAWTAGTKYHLNGRNSLANPGIAMATHKDDEERFFPSNGILIFGKQNAARDNADYSDVMLTSEEEIKTTNPVATEEYGIVADNLQQQNTAPQIGTVNSQGALPGMVWQNRDVYLQGPIWAKIPHTDGNFHPSPLMGGFGLKHPPPQILIKNTPVPADPPTTFNQSKLNSFITQYSTGQVSVEIEWELQKENSKRWNPEIQYTSNLYKSTSVDFAVNTEGVYSEPRPIGTRYLTRNL

SEQ ID NO: 639 - protein, 738 aa, synthetic construct
MAADGYLPDWLEDNLSEGIREWWALKPGAPKPKANQQKQDDGRGLVLPGYKYLGPFNGLDKGEPVNAADAAALEHDKAYDQQLQAGDNPYLRYNHADAEFQERLQEDTSFGGNLGRAVFQAKKRVLEPLGLVEEGAKTAPGKKRPVEPSPQRSPDSSTGIGKKGQQPARKRLNFGQTGDSESVPDPQPLGEPPAAPSGVGPNTMAAGGGAPMADNNEGADGVGSSSGNWHCDSTWLGDRVITTSTRTWALPTYNNHLYKQISNGTSGGATNDNTYFGYSTPWGYFDFNRFHCHFSPRDWQRLINNNWGFRPKRLSFKLFNIQVKEVTQNEGTKTIANNLTSTIQVFADSEYQLPYVLGSAHQGCLPPFPADVFMIPQYGYLTLNNGSQAVGRSSFYCLEYFPSQMLRTGNNFQFTYTFEDVPFHSSYAHSQSLDRLMNPLIDQYLYYLSRTQTTGGTANTQTLGFSQGGPNTMANQAKNWLPGPCYRQQRVSTTTGQNNNSNFAWTRGTKYHLNGRNSLANPGIAMATHKDDEERFFPSNGILIFGKQNAARDNADYSDVMLTSEEEIKTTNPVATEEYGIVADNLQQQNTAPQIGTVNSQGALPGMVWQNRDVYLQGPIWAKIPHTDGNFHPSPLMGGFGLKHPPPQILIKNTPVPADPPTTFNQSKLNSFITQYSTGQVSVEIEWELQKENSKRWNPEIQYTSNLYKSTSVDFAVNTEGVYSEPRPIGTRYLTRNL

SEQ ID NO: 640 - protein, 738 aa, synthetic construct
MAADGYLPDWLEDNLSEGIREWWALKPGAPKPKANQQKQDDGRGLVLPGYKYLGPFNGLDKGEPVNAADAAALEHDKAYDQQLQAGDNPYLRYNHADAEFQERLQEDTSFGGNLGRAVFQAKKRVLEPLGLVEEGAKTAPGKKRPVEPSPQRSPDSSTGIGKKGQQPARKRLNFGQTGDSESVPDPQPLGEPPAAPSGVGPNTMAAGGGAPMADNNEGADGVGSSSGNWHCDSTWLGDRVITTSTRTWALPTYNNHLYKQISNGTSGGATNDNTYFGYSTPWGYFDFNRFHCHFSPRDWQRLINNNWGFRPKRLSFKLFNIQVKEVTQNEGTKTIANNLTSTIQVFADSEYQLPYVLGSAHQGCLPPFPADVFMIPQYGYLTLNNGSQAVGRSSFYCLEYFPSQMLRTGNNFQFTYTFEDVPFHSSYAHSQSLDRLMNPLIDQYLYYLSRTQTTGGTANTQTLGFSQGGPNTMANQAKNWLPGPCYRQQRVSTTTGQNNNSNFAWTAGTKYHLNGRNSLANPGIAMATHKDDEERFFPSNGILIFGKQNAARDNADYSDVMLTSEEEIKTTNPVATEEYGIVADNLQQQNTAPQIGTVNSQGALPGMVWQNRDVYLQGPIWAKIPHTDGNFHPSPLMGGFGLKHPPPQILIKNTPVPADPPTTFNQSKLNSFITQYSTGQVSVEIEWELQKENSKRWNPEIQYTSNLCKSTSVDFAVNTEGVYSEPRPIGTRYLTRNL

SEQ ID NO: 641 - protein, 738 aa, synthetic construct
MAADGYLPDWLEDNLSEGIREWWALKPGAPKPKANQQKQDDGRGLVLPGYKYLGPFNGLDKGEPVNAADAAALEHDKAYDQQLQAGDNPYLRYNHADAEFQERLQEDTSFGGNLGRAVFQAKKRVLEPLGLVEEGAKTAPGKKRPVEPSPQRSPDSSTGIGKKGQQPARKRLNFGQTGDSESVPDPQPLGEPPAAPSGVGPNTMAAGGGAPMADNNEGADGVGSSSGNWHCDSTWLGDRVITTSTRTWALPTYNNHLYKQISNGTSGGATNDNTYFGYSTPWGYFDFNRFHCHFSPRDWQRLINNNWGFRPKRLSFKLFNIQVKEVTQNEGTKTIANNLTSTIQVFADSEYQLPYVLGSAHQGCLPPFPADVFMIPQYGYLTLNNGSQAVGRSSFYCLEYFPSQMLRTGNNFQFTYTFEDVPFHSSYAHSQSLDRLMNPLIDQYLYYLSRTQTTGGTANTQTLGFSQGGPNTMANQAKNWLPGPCYRQQRVSTTTGQNNNSNIAWTRGTKYHLNGRNSLANPGIAMATHKDDEERFFPSNGILIFGKQNAARDNADYSDVMLTSEEEIKTTNPVATEEYGIVADNLQQQNTAPQIGTVNSQGALPGMVWQNRDVYLQGPIWAKIPHTDGNFHPSPLMGGFGLKHPPPQILIKNTPVPADPPTTFNQSKLNSFITQYSTGQVSVEIEWELQKENSKRWNPEIQYTSNLYKSTSVDFAVNTEGVYSEPRPIGTRYLTRNL

SEQ ID NO: 642 - protein, 738 aa, synthetic construct
MAADGYLPDWLEDNLSEGIREWWALKPGAPKPKANQQKQDDGRGLVLPGYKYLGPFNGLDKGEPVNAADAAALEHDKAYDQQLQAGDNPYLRYNHADAEFQERLQEDTSFGGNLGRAVFQAKKRVLEPLGLVEEGAKTAPGKKRPVEPSPQRSPDSSTGIGKKGQQPARKRLNFGQTGDSESVPDPQPLGEPPAAPSGVGPNTMAAGGGAPMADNNEGADGVGSSSGNWHCDSTWLGDRVITTSTRTWALPTYNNHLYKQISNGTSGGATNDNTYFGYSTPWGYFDFNRFHCHFSPRDWQRLINNNWGFRPKRLSFKLFNIQVKEVTQNEGTKTIANNLTSTIQVFADSEYQLPYVLGSAHQGCLPPFPADVFMIPQYGYLTLNNGSQAVGRSSFYCLEYFPSQMLRTGNNFQFTYTFEDVPFHSSYAHSQSLDRLMNPLIDQYLYYLSRTQTTGGTANTQTLGFSQGGPNTMANQAKNWLPGPCYRQQRVSTTTGQNNNSNIAWTAGTKYHLNGRNSLANPGIAMATHKDDEERFFPSNGILIFGKQNAARDNADYSDVMLTSEEEIKTTNPVATEEYGIVADNLQQQNTAPQIGTVNSQGALPGMVWQNRDVYLQGPIWAKIPHTDGNFHPSPLMGGFGLKHPPPQILIKNTPVPADPPTTFNQSKLNSFITQYSTGQVSVEIEWELQKENSKRWNPEIQYTSNLCKSTSVDFAVNTEGVYSEPRPIGTRYLTRNL

SEQ ID NO: 643 - protein, 738 aa, synthetic construct
MAADGYLPDWLEDNLSEGIREWWALKPGAPKPKANQQKQDDGRGLVLPGYKYLGPFNGLDKGEPVNAADAAALEHDKAYDQQLQAGDNPYLRYNHADAEFQERLQEDTSFGGNLGRAVFQAKKRVLEPLGLVEEGAKTAPGKKRPVEPSPQRSPDSSTGIGKKGQQPARKRLNFGQTGDSESVPDPQPLGEPPAAPSGVGPNTMAAGGGAPMADNNEGADGVGSSSGNWHCDSTWLGDRVITTSTRTWALPTYNNHLYKQISNGTSGGATNDNTYFGYSTPWGYFDFNRFHCHFSPRDWQRLINNNWGFRPKRLSFKLFNIQVKEVTQNEGTKTIANNLTSTIQVFADSEYQLPYVLGSAHQGCLPPFPADVFMIPQYGYLTLNNGSQAVGRSSFYCLEYFPSQMLRTGNNFQFTYTFEDVPFHSSYAHSQSLDRLMNPLIDQYLYYLSRTQTTGGTANTQTLGFSQGGPNTMANQAKNWLPGPCYRQQRVSTTTGQNNNSNFAWTRGTKYHLNGRNSLANPGIAMATHKDDEERFFPSNGILIFGKQNAARDNADYSDVMLTSEEEIKTTNPVATEEYGIVADNLQQQNTAPQIGTVNSQGALPGMVWQNRDVYLQGPIWAKIPHTDGNFHPSPLMGGFGLKHPPPQILIKNTPVPADPPTTFNQSKLNSFITQYSTGQVSVEIEWELQKENSKRWNPEIQYTSNLCKSTSVDFAVNTEGVYSEPRPIGTRYLTRNL

SEQ ID NO: 644 - protein, 738 aa, synthetic construct
MAADGYLPDWLEDNLSEGIREWWALKPGAPKPKANQQKQDDGRGLVLPGYKYLGPFNGLDKGEPVNAADAAALEHDKAYDQQLQAGDNPYLRYNHADAEFQERLQEDTSFGGNLGRAVFQAKKRVLEPLGLVEEGAKTAPGKKRPVEPSPQRSPDSSTGIGKKGQQPARKRLNFGQTGDSESVPDPQPLGEPPAAPSGVGPNTMAAGGGAPMADNNEGADGVGSSSGNWHCDSTWLGDRVITTSTRTWALPTYNNHLYKQISNGTSGGATNDNTYFGYSTPWGYFDFNRFHCHFSPRDWQRLINNNWGFRPKRLSFKLFNIQVKEVTQNEGTKTIANNLTSTIQVFADSEYQLPYVLGSAHQGCLPPFPADVFMIPQYGYLTLNNGSQAVGRSSFYCLEYFPSQMLRTGNNFQFTYTFEDVPFHSSYAHSQSLDRLMNPLIDQYLYYLSRTQTTGGTANTQTLGFSQGGPNTMANQAKNWLPGPCYRQQRVSTTTGQNNNSNIAWTRGTKYHLNGRNSLANPGIAMATHKDDEERFFPSNGILIFGKQNAARDNADYSDVMLTSEEEIKTTNPVATEEYGIVADNLQQQNTAPQIGTVNSQGALPGMVWQNRDVYLQGPIWAKIPHTDGNFHPSPLMGGFGLKHPPPQILIKNTPVPADPPTTFNQSKLNSFITQYSTGQVSVEIEWELQKENSKRWNPEIQYTSNLCKSTSVDFAVNTEGVYSEPRPIGTRYLTRNL

SEQ ID NO: 645 - protein, 736 aa, synthetic construct
MAADGYLPDWLEDNLSEGIREWWALKPGAPQPKANQQHQDNARGLVLPGYKYLGPGNGLDKGEPVNAADAAALEHDKAYDQQLKAGDNPYLKYNHADAEFQERLKEDTSFGGNLGRAVFQAKKRLLEPLGLVEEAAKTAPGKKRPVEQSPQEPDSSAGIGKSGAQPAKKRLNFGQTGDTESVPDPQPIGEPPAAPSGVGSLTMASGGGAPVADNNEGADGVGSSSGNWHCDSQWLGDRVITTSTRTWALPTYNNHLYKQISNSTSGGSSNDNAYFGYSTPWGYFDFNRFHCHFSPRDWQRLINNNWGFRPKRLNFKLFNIQVKEVTDNNGVKTIANNLTSTVQVFGDSDYQLPYVLGSAHEGCLPPFPADVFMIPQYGYLTLNDGSQAVGRSSFYCLEYFPSQMLRTGNNFQFSYEFENVPFHSSYAHSQSLDRLMNPLIDQYLYYLSKTINGSGQNQQTLKFSVAGPSNMAVQGRNYIPGPSYRQQRVSTTVTQNNNSEFAWPGASSWALNGRNSLMNPGPAMASHKEGEDRFFPLSGSLIFGKQGTGRDNVDADKVMITNEEEIKTTNPVATESYGQVATNHQSAQAQAQTGWVQNQGILPGMVWQDRDVYLQGPIWAKIPHTDGNFHPSPLMGGFGMKHPPPQILIKNTPVPADPPTAFNKDKLNSFITQYSTGQVSVEIEWELQKENSKRWNPEIQYTSNYYKSNNVEFAVNTEGVYSEPRPIGTRYLTRNL

SEQ ID NO: 646 - protein, 736 aa, synthetic construct
MAADGYLPDWLEDNLSEGIREWWALKPGAPQPKANQQHQDNARGLVLPGYKYLGPGNGLDKGEPVNAADAAALEHDKAYDQQLKAGDNPYLKYNHADAEFQERLKEDTSFGGNLGRAVFQAKKRLLEPLGLVEEAAKTAPGKKRPVEQSPQEPDSSAGIGKSGAQPAKKRLNFGQTGDTESVPDPQPIGEPPAAPSGVGSLTMASGGGAPVADNNEGADGVGSSSGNWHCDSQWLGDRVITTSTRTWALPTYNNHLYKQISNSTSGGSSNDNAYFGYSTPWGYFDFNRFHCHFSPRDWQRLINNNWGFRPKRLNFKLFNIQVKEVTDNNGVKTIANNLTSTVQVFGDSDYQLPYVLGSAHEGCLPPFPADVFMIPQYGYLTLNDGSQAVGRSSFYCLEYFPSQMLRTGNNFQFSYEFENVPFHSSYAHSQSLDRLMNPLIDQYLYYLSKTINGSGQNQQTLKFSVAGPSNMAVQGRNYIPGPSYRQQRVSTTVTQNNNSEIAWPGASSWALNGRNSLMNPGPAMASHKEGEDRFFPLSGSLIFGKQGTGRDNVDADKVMITNEEEIKTTNPVATESYGQVATNHQSAQAQAQTGWVQNQGILPGMVWQDRDVYLQGPIWAKIPHTDGNFHPSPLMGGFGMKHPPPQILIKNTPVPADPPTAFNKDKLNSFITQYSTGQVSVEIEWELQKENSKRWNPEIQYTSNYYKSNNVEFAVNTEGVYSEPRPIGTRYLTRNL

SEQ ID NO: 647 - protein, 736 aa, synthetic construct
MAADGYLPDWLEDNLSEGIREWWALKPGAPQPKANQQHQDNARGLVLPGYKYLGPGNGLDKGEPVNAADAAALEHDKAYDQQLKAGDNPYLKYNHADAEFQERLKEDTSFGGNLGRAVFQAKKRLLEPLGLVEEAAKTAPGKKRPVEQSPQEPDSSAGIGKSGAQPAKKRLNFGQTGDTESVPDPQPIGEPPAAPSGVGSLTMASGGGAPVADNNEGADGVGSSSGNWHCDSQWLGDRVITTSTRTWALPTYNNHLYKQISNSTSGGSSNDNAYFGYSTPWGYFDFNRFHCHFSPRDWQRLINNNWGFRPKRLNFKLFNIQVKEVTDNNGVKTIANNLTSTVQVFGDSDYQLPYVLGSAHEGCLPPFPADVFMIPQYGYLTLNDGSQAVGRSSFYCLEYFPSQMLRTGNNFQFSYEFENVPFHSSYAHSQSLDRLMNPLIDQYLYYLSKTINGSGQNQQTLKFSVAGPSNMAVQGRNYIPGPSYRQQRVSTTVTQNNNSEFAWPGASSWALNGRNSLMNPGPAMASHKEGEDRFFPLSGSLIFGKQGTGRDNVDADKVMITNEEEIKTTNPVATESYGQVATNHQSAQAQAQTGWVQNQGILPGMVWQDRDVYLQGPIWAKIPHTDGNFHPSPLMGGFGMKHPPPQILIKNTPVPADPPTAFNKDKLNSFITQYSTGQVSVEIEWELQKENSKRWNPEIQYTSNYCKSNNVEFAVNTEGVYSEPRPIGTRYLTRNL

SEQ ID NO: 648 - protein, 736 aa, synthetic construct
MAADGYLPDWLEDNLSEGIREWWALKPGAPQPKANQQHQDNARGLVLPGYKYLGPGNGLDKGEPVNAADAAALEHDKAYDQQLKAGDNPYLKYNHADAEFQERLKEDTSFGGNLGRAVFQAKKRLLEPLGLVEEAAKTAPGKKRPVEQSPQEPDSSAGIGKSGAQPAKKRLNFGQTGDTESVPDPQPIGEPPAAPSGVGSLTMASGGGAPVADNNEGADGVGSSSGNWHCDSQWLGDRVITTSTRTWALPTYNNHLYKQISNSTSGGSSNDNAYFGYSTPWGYFDFNRFHCHFSPRDWQRLINNNWGFRPKRLNFKLFNIQVKEVTDNNGVKTIANNLTSTVQVFGDSDYQLPYVLGSAHEGCLPPFPADVFMIPQYGYLTLNDGSQAVGRSSFYCLEYFPSQMLRTGNNFQFSYEFENVPFHSSYAHSQSLDRLMNPLIDQYLYYLSKTINGSGQNQQTLKFSVAGPSNMAVQGRNYIPGPSYRQQRVSTTVTQNNNSEIAWPRASSWALNGRNSLMNPGPAMASHKEGEDRFFPLSGSLIFGKQGTGRDNVDADKVMITNEEEIKTTNPVATESYGQVATNHQSAQAQAQTGWVQNQGILPGMVWQDRDVYLQGPIWAKIPHTDGNFHPSPLMGGFGMKHPPPQILIKNTPVPADPPTAFNKDKLNSFITQYSTGQVSVEIEWELQKENSKRWNPEIQYTSNYYKSNNVEFAVNTEGVYSEPRPIGTRYLTRNL

SEQ ID NO: 649 - protein, 736 aa, synthetic construct
MAADGYLPDWLEDNLSEGIREWWALKPGAPQPKANQQHQDNARGLVLPGYKYLGPGNGLDKGEPVNAADAAALEHDKAYDQQLKAGDNPYLKYNHADAEFQERLKEDTSFGGNLGRAVFQAKKRLLEPLGLVEEAAKTAPGKKRPVEQSPQEPDSSAGIGKSGAQPAKKRLNFGQTGDTESVPDPQPIGEPPAAPSGVGSLTMASGGGAPVADNNEGADGVGSSSGNWHCDSQWLGDRVITTSTRTWALPTYNNHLYKQISNSTSGGSSNDNAYFGYSTPWGYFDFNRFHCHFSPRDWQRLINNNWGFRPKRLNFKLFNIQVKEVTDNNGVKTIANNLTSTVQVFGDSDYQLPYVLGSAHEGCLPPFPADVFMIPQYGYLTLNDGSQAVGRSSFYCLEYFPSQMLRTGNNFQFSYEFENVPFHSSYAHSQSLDRLMNPLIDQYLYYLSKTINGSGQNQQTLKFSVAGPSNMAVQGRNYIPGPSYRQQRVSTTVTQNNNSEIAWPGASSWALNGRNSLMNPGPAMASHKEGEDRFFPLSGSLIFGKQGTGRDNVDADKVMITNEEEIKTTNPVATESYGQVATNHQSAQAQAQTGWVQNQGILPGMVWQDRDVYLQGPIWAKIPHTDGNFHPSPLMGGFGMKHPPPQILIKNTPVPADPPTAFNKDKLNSFITQYSTGQVSVEIEWELQKENSKRWNPEIQYTSNYCKSNNVEFAVNTEGVYSEPRPIGTRYLTRNL

SEQ ID NO: 650 - protein, 736 aa, synthetic construct
MAADGYLPDWLEDNLSEGIREWWALKPGAPQPKANQQHQDNARGLVLPGYKYLGPGNGLDKGEPVNAADAAALEHDKAYDQQLKAGDNPYLKYNHADAEFQERLKEDTSFGGNLGRAVFQAKKRLLEPLGLVEEAAKTAPGKKRPVEQSPQEPDSSAGIGKSGAQPAKKRLNFGQTGDTESVPDPQPIGEPPAAPSGVGSLTMASGGGAPVADNNEGADGVGSSSGNWHCDSQWLGDRVITTSTRTWALPTYNNHLYKQISNSTSGGSSNDNAYFGYSTPWGYFDFNRFHCHFSPRDWQRLINNNWGFRPKRLNFKLFNIQVKEVTDNNGVKTIANNLTSTVQVFGDSDYQLPYVLGSAHEGCLPPFPADVFMIPQYGYLTLNDGSQAVGRSSFYCLEYFPSQMLRTGNNFQFSYEFENVPFHSSYAHSQSLDRLMNPLIDQYLYYLSKTINGSGQNQQTLKFSVAGPSNMAVQGRNYIPGPSYRQQRVSTTVTQNNNSEFAWPRASSWALNGRNSLMNPGPAMASHKEGEDRFFPLSGSLIFGKQGTGRDNVDADKVMITNEEEIKTTNPVATESYGQVATNHQSAQAQAQTGWVQNQGILPGMVWQDRDVYLQGPIWAKIPHTDGNFHPSPLMGGFGMKHPPPQILIKNTPVPADPPTAFNKDKLNSFITQYSTGQVSVEIEWELQKENSKRWNPEIQYTSNYCKSNNVEFAVNTEGVYSEPRPIGTRYLTRNL

SEQ ID NO: 651 - protein, 736 aa, synthetic construct
MAADGYLPDWLEDNLSEGIREWWALKPGAPQPKANQQHQDNARGLVLPGYKYLGPGNGLDKGEPVNAADAAALEHDKAYDQQLKAGDNPYLKYNHADAEFQERLKEDTSFGGNLGRAVFQAKKRLLEPLGLVEEAAKTAPGKKRPVEQSPQEPDSSAGIGKSGAQPAKKRLNFGQTGDTESVPDPQPIGEPPAAPSGVGSLTMASGGGAPVADNNEGADGVGSSSGNWHCDSQWLGDRVITTSTRTWALPTYNNHLYKQISNSTSGGSSNDNAYFGYSTPWGYFDFNRFHCHFSPRDWQRLINNNWGFRPKRLNFKLFNIQVKEVTDNNGVKTIANNLTSTVQVFGDSDYQLPYVLGSAHEGCLPPFPADVFMIPQYGYLTLNDGSQAVGRSSFYCLEYFPSQMLRTGNNFQFSYEFENVPFHSSYAHSQSLDRLMNPLIDQYLYYLSKTINGSGQNQQTLKFSVAGPSNMAVQGRNYIPGPSYRQQRVSTTVTQNNNSEIAWPRASSWALNGRNSLMNPGPAMASHKEGEDRFFPLSGSLIFGKQGTGRDNVDADKVMITNEEEIKTTNPVATESYGQVATNHQSAQAQAQTGWVQNQGILPGMVWQDRDVYLQGPIWAKIPHTDGNFHPSPLMGGFGMKHPPPQILIKNTPVPADPPTAFNKDKLNSFITQYSTGQVSVEIEWELQKENSKRWNPEIQYTSNYCKSNNVEFAVNTEGVYSEPRPIGTRYLTRNL

SEQ ID NO: 652 - protein, 736 aa, synthetic construct
MAADGYLPDWLEDNLSEGIREWWALKPGAPQPKANQQHQDNARGLVLPGYKYLGPGNGLDKGEPVNAADAAALEHDKAYDQQLKAGDNPYLKYNHADAEFQERLKEDTSFGGNLGRAVFQAKKRLLEPLGLVEEAAKTAPGKKRPVEQSPQEPDSSAGIGKSGAQPAKKRLNFGQTGDTESVPDPQPIGEPPAAPSGVGSLTMASGGGAPVADNNEGADGVGSSSGNWHCDSQWLGDRVITTSTRTWALPTYNNHLYKQISNSTSGGSSNDNAYFGYSTPWGYFDFNRFHCHFSPRDWQRLINNNWGFRPKRLNFKLFNIQVKEVTDNNGVKTIANNLTSTVQVFTDSDYQLPYVLGSAHEGCLPPFPADVFMIPQYGYLTLNDGSQAVGRSSFYCLEYFPSQMLRTGNNFQFSYEFENVPFHSSYAHSQSLDRLMNPLIDQYLYYLSKTINGSGQNQQTLKFSVAGPSNMAVQGRNYIPGPSYRQQRVSTTVTQNNNSEFAWPGASSWALNGRNSLMNPGPAMASHKEGEDRFFPLSGSLIFGKQGTGRDNVDADKVMITNEEEIKTTNPVATESYGQVATNHQSAQAQAQTGWVQNQGILPGMVWQDRDVYLQGPIWAKIPHTDGNFHPSPLMGGFGMKHPPPQILIKNTPVPADPPTAFNKDKLNSFITQYSTGQVSVEIEWELQKENSKRWNPEIQYTSNLYKSNNVEFAVNTEGVYSEPRPIGTRYLTRNL

SEQ ID NO: 653 - protein, 736 aa, synthetic construct
MAADGYLPDWLEDNLSEGIREWWALKPGAPQPKANQQHQDNARGLVLPGYKYLGPGNGLDKGEPVNAADAAALEHDKAYDQQLKAGDNPYLKYNHADAEFQERLKEDTSFGGNLGRAVFQAKKRLLEPLGLVEEAAKTAPGKKRPVEQSPQEPDSSAGIGKSGAQPAKKRLNFGQTGDTESVPDPQPIGEPPAAPSGVGSLTMASGGGAPVADNNEGADGVGSSSGNWHCDSQWLGDRVITTSTRTWALPTYNNHLYKQISNSTSGGSSNDNAYFGYSTPWGYFDFNRFHCHFSPRDWQRLINNNWGFRPKRLNFKLFNIQVKEVTDNNGVKTIANNLTSTVQVFTDSDYQLPYVLGSAHEGCLPPFPADVFMIPQYGYLTLNDGSQAVGRSSFYCLEYFPSQMLRTGNNFQFSYEFENVPFHSSYAHSQSLDRLMNPLIDQYLYYLSKTINGSGQNQQTLKFSVAGPSNMAVQGRNYIPGPSYRQQRVSTTVTQNNNSEIAWPGASSWALNGRNSLMNPGPAMASHKEGEDRFFPLSGSLIFGKQGTGRDNVDADKVMITNEEEIKTTNPVATESYGQVATNHQSAQAQAQTGWVQNQGILPGMVWQDRDVYLQGPIWAKIPHTDGNFHPSPLMGGFGMKHPPPQILIKNTPVPADPPTAFNKDKLNSFITQYSTGQVSVEIEWELQKENSKRWNPEIQYTSNLYKSNNVEFAVNTEGVYSEPRPIGTRYLTRNL

SEQ ID NO: 654 - protein, 736 aa, synthetic construct
MAADGYLPDWLEDNLSEGIREWWALKPGAPQPKANQQHQDNARGLVLPGYKYLGPGNGLDKGEPVNAADAAALEHDKAYDQQLKAGDNPYLKYNHADAEFQERLKEDTSFGGNLGRAVFQAKKRLLEPLGLVEEAAKTAPGKKRPVEQSPQEPDSSAGIGKSGAQPAKKRLNFGQTGDTESVPDPQPIGEPPAAPSGVGSLTMASGGGAPVADNNEGADGVGSSSGNWHCDSQWLGDRVITTSTRTWALPTYNNHLYKQISNSTSGGSSNDNAYFGYSTPWGYFDFNRFHCHFSPRDWQRLINNNWGFRPKRLNFKLFNIQVKEVTDNNGVKTIANNLTSTVQVFTDSDYQLPYVLGSAHEGCLPPFPADVFMIPQYGYLTLNDGSQAVGRSSFYCLEYFPSQMLRTGNNFQFSYEFENVPFHSSYAHSQSLDRLMNPLIDQYLYYLSKTINGSGQNQQTLKFSVAGPSNMAVQGRNYIPGPSYRQQRVSTTVTQNNNSEFAWPGASSWALNGRNSLMNPGPAMASHKEGEDRFFPLSGSLIFGKQGTGRDNVDADKVMITNEEEIKTTNPVATESYGQVATNHQSAQAQAQTGWVQNQGILPGMVWQDRDVYLQGPIWAKIPHTDGNFHPSPLMGGFGMKHPPPQILIKNTPVPADPPTAFNKDKLNSFITQYSTGQVSVEIEWELQKENSKRWNPEIQYTSNLCKSNNVEFAVNTEGVYSEPRPIGTRYLTRNL

SEQ ID NO: 655 - protein, 736 aa, synthetic construct
MAADGYLPDWLEDNLSEGIREWWALKPGAPQPKANQQHQDNARGLVLPGYKYLGPGNGLDKGEPVNAADAAALEHDKAYDQQLKAGDNPYLKYNHADAEFQERLKEDTSFGGNLGRAVFQAKKRLLEPLGLVEEAAKTAPGKKRPVEQSPQEPDSSAGIGKSGAQPAKKRLNFGQTGDTESVPDPQPIGEPPAAPSGVGSLTMASGGGAPVADNNEGADGVGSSSGNWHCDSQWLGDRVITTSTRTWALPTYNNHLYKQISNSTSGGSSNDNAYFGYSTPWGYFDFNRFHCHFSPRDWQRLINNNWGFRPKRLNFKLFNIQVKEVTDNNGVKTIANNLTSTVQVFTDSDYQLPYVLGSAHEGCLPPFPADVFMIPQYGYLTLNDGSQAVGRSSFYCLEYFPSQMLRTGNNFQFSYEFENVPFHSSYAHSQSLDRLMNPLIDQYLYYLSKTINGSGQNQQTLKFSVAGPSNMAVQGRNYIPGPSYRQQRVSTTVTQNNNSEIAWPRASSWALNGRNSLMNPGPAMASHKEGEDRFFPLSGSLIFGKQGTGRDNVDADKVMITNEEEIKTTNPVATESYGQVATNHQSAQAQAQTGWVQNQGILPGMVWQDRDVYLQGPIWAKIPHTDGNFHPSPLMGGFGMKHPPPQILIKNTPVPADPPTAFNKDKLNSFITQYSTGQVSVEIEWELQKENSKRWNPEIQYTSNLYKSNNVEFAVNTEGVYSEPRPIGTRYLTRNL

SEQ ID NO: 656 - protein, 736 aa, synthetic construct
MAADGYLPDWLEDNLSEGIREWWALKPGAPQPKANQQHQDNARGLVLPGYKYLGPGNGLDKGEPVNAADAAALEHDKAYDQQLKAGDNPYLKYNHADAEFQERLKEDTSFGGNLGRAVFQAKKRLLEPLGLVEEAAKTAPGKKRPVEQSPQEPDSSAGIGKSGAQPAKKRLNFGQTGDTESVPDPQPIGEPPAAPSGVGSLTMASGGGAPVADNNEGADGVGSSSGNWHCDSQWLGDRVITTSTRTWALPTYNNHLYKQISNSTSGGSSNDNAYFGYSTPWGYFDFNRFHCHFSPRDWQRLINNNWGFRPKRLNFKLFNIQVKEVTDNNGVKTIANNLTSTVQVFTDSDYQLPYVLGSAHEGCLPPFPADVFMIPQYGYLTLNDGSQAVGRSSFYCLEYFPSQMLRTGNNFQFSYEFENVPFHSSYAHSQSLDRLMNPLIDQYLYYLSKTINGSGQNQQTLKFSVAGPSNMAVQGRNYIPGPSYRQQRVSTTVTQNNNSEIAWPGASSWALNGRNSLMNPGPAMASHKEGEDRFFPLSGSLIFGKQGTGRDNVDADKVMITNEEEIKTTNPVATESYGQVATNHQSAQAQAQTGWVQNQGILPGMVWQDRDVYLQGPIWAKIPHTDGNFHPSPLMGGFGMKHPPPQILIKNTPVPADPPTAFNKDKLNSFITQYSTGQVSVEIEWELQKENSKRWNPEIQYTSNLCKSNNVEFAVNTEGVYSEPRPIGTRYLTRNL

SEQ ID NO: 657 - protein, 736 aa, synthetic construct
MAADGYLPDWLEDNLSEGIREWWALKPGAPQPKANQQHQDNARGLVLPGYKYLGPGNGLDKGEPVNAADAAALEHDKAYDQQLKAGDNPYLKYNHADAEFQERLKEDTSFGGNLGRAVFQAKKRLLEPLGLVEEAAKTAPGKKRPVEQSPQEPDSSAGIGKSGAQPAKKRLNFGQTGDTESVPDPQPIGEPPAAPSGVGSLTMASGGGAPVADNNEGADGVGSSSGNWHCDSQWLGDRVITTSTRTWALPTYNNHLYKQISNSTSGGSSNDNAYFGYSTPWGYFDFNRFHCHFSPRDWQRLINNNWGFRPKRLNFKLFNIQVKEVTDNNGVKTIANNLTSTVQVFTDSDYQLPYVLGSAHEGCLPPFPADVFMIPQYGYLTLNDGSQAVGRSSFYCLEYFPSQMLRTGNNFQFSYEFENVPFHSSYAHSQSLDRLMNPLIDQYLYYLSKTINGSGQNQQTLKFSVAGPSNMAVQGRNYIPGPSYRQQRVSTTVTQNNNSEFAWPRASSWALNGRNSLMNPGPAMASHKEGEDRFFPLSGSLIFGKQGTGRDNVDADKVMITNEEEIKTTNPVATESYGQVATNHQSAQAQAQTGWVQNQGILPGMVWQDRDVYLQGPIWAKIPHTDGNFHPSPLMGGFGMKHPPPQILIKNTPVPADPPTAFNKDKLNSFITQYSTGQVSVEIEWELQKENSKRWNPEIQYTSNLCKSNNVEFAVNTEGVYSEPRPIGTRYLTRNL

SEQ ID NO: 658 - protein, 736 aa, synthetic construct
MAADGYLPDWLEDNLSEGIREWWALKPGAPQPKANQQHQDNARGLVLPGYKYLGPGNGLDKGEPVNAADAAALEHDKAYDQQLKAGDNPYLKYNHADAEFQERLKEDTSFGGNLGRAVFQAKKRLLEPLGLVEEAAKTAPGKKRPVEQSPQEPDSSAGIGKSGAQPAKKRLNFGQTGDTESVPDPQPIGEPPAAPSGVGSLTMASGGGAPVADNNEGADGVGSSSGNWHCDSQWLGDRVITTSTRTWALPTYNNHLYKQISNSTSGGSSNDNAYFGYSTPWGYFDFNRFHCHFSPRDWQRLINNNWGFRPKRLNFKLFNIQVKEVTDNNGVKTIANNLTSTVQVFTDSDYQLPYVLGSAHEGCLPPFPADVFMIPQYGYLTLNDGSQAVGRSSFYCLEYFPSQMLRTGNNFQFSYEFENVPFHSSYAHSQSLDRLMNPLIDQYLYYLSKTINGSGQNQQTLKFSVAGPSNMAVQGRNYIPGPSYRQQRVSTTVTQNNNSEIAWPRASSWALNGRNSLMNPGPAMASHKEGEDRFFPLSGSLIFGKQGTGRDNVDADKVMITNEEEIKTTNPVATESYGQVATNHQSAQAQAQTGWVQNQGILPGMVWQDRDVYLQGPIWAKIPHTDGNFHPSPLMGGFGMKHPPPQILIKNTPVPADPPTAFNKDKLNSFITQYSTGQVSVEIEWELQKENSKRWNPEIQYTSNLCKSNNVEFAVNTEGVYSEPRPIGTRYLTRNL

SEQ ID NO: 659 - protein, 736 aa, synthetic construct
MAADGYLPDWLEDNLSEGIREWWALKPGAPQPKANQQHQDNARGLVLPGYKYLGPGNGLDKGEPVNAADAAALEHDKAYDQQLKAGDNPYLKYNHADAEFQERLKEDTSFGGNLGRAVFQAKKRLLEPLGLVEEAAKTAPGKKRPVEQSPQEPDSSAGIGKSGAQPAKKRLNFGQTGDTESVPDPQPIGEPPAAPSGVGSLTMASGGGAPVADNNEGADGVGSSSGNWHCDSQWLGDRVITTSTRTWALPTYNNHLYKQISNSTSGGSSNDNAYFGYSTPWGYFDFNRFHCHFSPRDWQRLINNNWGFRPKRLNFKLFNIQVKEVTDNNGVKTIANNLTSTVQVFGDSDYQLPYVLGSAHEGCLPPFPADVFMIPQYGYLTLNDGSQAVGRSSFYCLEYFPSQMLRTGNNFQFSYEFENVPFHSSYAHSQSLDRLMNPLIDQYLYYLSKTINGSGQNQQTLKFSVAGPSNMAVQGRNYIPGPSYRQQRVSTTVTQNNNSEFAWPGASSWALNGRNSLMNPGPAMASHKEGEDRFFPLSGSLIFGKQGTGRDNVDADKVMITNEEEIKTTNPVATESYGQVATNHQSAQAQAQTGWVQNQGILPGMVWQDRDVYLQGPIWAKIPHTDGNFHPSPLMGGFGMKHPPPQILIKNTPVPADPPTAFNKDKLNSFITQYSTGQVSVEIEWELQKENSKRWNPEIQYTSNLYKSNNVEFAVNTEGVYSEPRPIGTRYLTRNL

SEQ ID NO: 660 - protein, 736 aa, synthetic construct
MAADGYLPDWLEDNLSEGIREWWALKPGAPQPKANQQHQDNARGLVLPGYKYLGPGNGLDKGEPVNAADAAALEHDKAYDQQLKAGDNPYLKYNHADAEFQERLKEDTSFGGNLGRAVFQAKKRLLEPLGLVEEAAKTAPGKKRPVEQSPQEPDSSAGIGKSGAQPAKKRLNFGQTGDTESVPDPQPIGEPPAAPSGVGSLTMASGGGAPVADNNEGADGVGSSSGNWHCDSQWLGDRVITTSTRTWALPTYNNHLYKQISNSTSGGSSNDNAYFGYSTPWGYFDFNRFHCHFSPRDWQRLINNNWGFRPKRLNFKLFNIQVKEVTDNNGVKTIANNLTSTVQVFGDSDYQLPYVLGSAHEGCLPPFPADVFMIPQYGYLTLNDGSQAVGRSSFYCLEYFPSQMLRTGNNFQFSYEFENVPFHSSYAHSQSLDRLMNPLIDQYLYYLSKTINGSGQNQQTLKFSVAGPSNMAVQGRNYIPGPSYRQQRVSTTVTQNNNSEIAWPGASSWALNGRNSLMNPGPAMASHKEGEDRFFPLSGSLIFGKQGTGRDNVDADKVMITNEEEIKTTNPVATESYGQVATNHQSAQAQAQTGWVQNQGILPGMVWQDRDVYLQGPIWAKIPHTDGNFHPSPLMGGFGMKHPPPQILIKNTPVPADPPTAFNKDKLNSFITQYSTGQVSVEIEWELQKENSKRWNPEIQYTSNLYKSNNVEFAVNTEGVYSEPRPIGTRYLTRNL

SEQ ID NO: 661 - protein, 736 aa, synthetic construct
MAADGYLPDWLEDNLSEGIREWWALKPGAPQPKANQQHQDNARGLVLPGYKYLGPGNGLDKGEPVNAADAAALEHDKAYDQQLKAGDNPYLKYNHADAEFQERLKEDTSFGGNLGRAVFQAKKRLLEPLGLVEEAAKTAPGKKRPVEQSPQEPDSSAGIGKSGAQPAKKRLNFGQTGDTESVPDPQPIGEPPAAPSGVGSLTMASGGGAPVADNNEGADGVGSSSGNWHCDSQWLGDRVITTSTRTWALPTYNNHLYKQISNSTSGGSSNDNAYFGYSTPWGYFDFNRFHCHFSPRDWQRLINNNWGFRPKRLNFKLFNIQVKEVTDNNGVKTIANNLTSTVQVFGDSDYQLPYVLGSAHEGCLPPFPADVFMIPQYGYLTLNDGSQAVGRSSFYCLEYFPSQMLRTGNNFQFSYEFENVPFHSSYAHSQSLDRLMNPLIDQYLYYLSKTINGSGQNQQTLKFSVAGPSNMAVQGRNYIPGPSYRQQRVSTTVTQNNNSEFAWPGASSWALNGRNSLMNPGPAMASHKEGEDRFFPLSGSLIFGKQGTGRDNVDADKVMITNEEEIKTTNPVATESYGQVATNHQSAQAQAQTGWVQNQGILPGMVWQDRDVYLQGPIWAKIPHTDGNFHPSPLMGGFGMKHPPPQILIKNTPVPADPPTAFNKDKLNSFITQYSTGQVSVEIEWELQKENSKRWNPEIQYTSNLCKSNNVEFAVNTEGVYSEPRPIGTRYLTRNL

SEQ ID NO: 662 - protein, 736 aa, synthetic construct
MAADGYLPDWLEDNLSEGIREWWALKPGAPQPKANQQHQDNARGLVLPGYKYLGPGNGLDKGEPVNAADAAALEHDKAYDQQLKAGDNPYLKYNHADAEFQERLKEDTSFGGNLGRAVFQAKKRLLEPLGLVEEAAKTAPGKKRPVEQSPQEPDSSAGIGKSGAQPAKKRLNFGQTGDTESVPDPQPIGEPPAAPSGVGSLTMASGGGAPVADNNEGADGVGSSSGNWHCDSQWLGDRVITTSTRTWALPTYNNHLYKQISNSTSGGSSNDNAYFGYSTPWGYFDFNRFHCHFSPRDWQRLINNNWGFRPKRLNFKLFNIQVKEVTDNNGVKTIANNLTSTVQVFGDSDYQLPYVLGSAHEGCLPPFPADVFMIPQYGYLTLNDGSQAVGRSSFYCLEYFPSQMLRTGNNFQFSYEFENVPFHSSYAHSQSLDRLMNPLIDQYLYYLSKTINGSGQNQQTLKFSVAGPSNMAVQGRNYIPGPSYRQQRVSTTVTQNNNSEIAWPRASSWALNGRNSLMNPGPAMASHKEGEDRFFPLSGSLIFGKQGTGRDNVDADKVMITNEEEIKTTNPVATESYGQVATNHQSAQAQAQTGWVQNQGILPGMVWQDRDVYLQGPIWAKIPHTDGNFHPSPLMGGFGMKHPPPQILIKNTPVPADPPTAFNKDKLNSFITQYSTGQVSVEIEWELQKENSKRWNPEIQYTSNLYKSNNVEFAVNTEGVYSEPRPIGTRYLTRNL

SEQ ID NO: 663 - protein, 736 aa, synthetic construct
MAADGYLPDWLEDNLSEGIREWWALKPGAPQPKANQQHQDNARGLVLPGYKYLGPGNGLDKGEPVNAADAAALEHDKAYDQQLKAGDNPYLKYNHADAEFQERLKEDTSFGGNLGRAVFQAKKRLLEPLGLVEEAAKTAPGKKRPVEQSPQEPDSSAGIGKSGAQPAKKRLNFGQTGDTESVPDPQPIGEPPAAPSGVGSLTMASGGGAPVADNNEGADGVGSSSGNWHCDSQWLGDRVITTSTRTWALPTYNNHLYKQISNSTSGGSSNDNAYFGYSTPWGYFDFNRFHCHFSPRDWQRLINNNWGFRPKRLNFKLFNIQVKEVTDNNGVKTIANNLTSTVQVFGDSDYQLPYVLGSAHEGCLPPFPADVFMIPQYGYLTLNDGSQAVGRSSFYCLEYFPSQMLRTGNNFQFSYEFENVPFHSSYAHSQSLDRLMNPLIDQYLYYLSKTINGSGQNQQTLKFSVAGPSNMAVQGRNYIPGPSYRQQRVSTTVTQNNNSEIAWPGASSWALNGRNSLMNPGPAMASHKEGEDRFFPLSGSLIFGKQGTGRDNVDADKVMITNEEEIKTTNPVATESYGQVATNHQSAQAQAQTGWVQNQGILPGMVWQDRDVYLQGPIWAKIPHTDGNFHPSPLMGGFGMKHPPPQILIKNTPVPADPPTAFNKDKLNSFITQYSTGQVSVEIEWELQKENSKRWNPEIQYTSNLCKSNNVEFAVNTEGVYSEPRPIGTRYLTRNL

SEQ ID NO: 664 - protein, 736 aa, synthetic construct
MAADGYLPDWLEDNLSEGIREWWALKPGAPQPKANQQHQDNARGLVLPGYKYLGPGNGLDKGEPVNAADAAALEHDKAYDQQLKAGDNPYLKYNHADAEFQERLKEDTSFGGNLGRAVFQAKKRLLEPLGLVEEAAKTAPGKKRPVEQSPQEPDSSAGIGKSGAQPAKKRLNFGQTGDTESVPDPQPIGEPPAAPSGVGSLTMASGGGAPVADNNEGADGVGSSSGNWHCDSQWLGDRVITTSTRTWALPTYNNHLYKQISNSTSGGSSNDNAYFGYSTPWGYFDFNRFHCHFSPRDWQRLINNNWGFRPKRLNFKLFNIQVKEVTDNNGVKTIANNLTSTVQVFGDSDYQLPYVLGSAHEGCLPPFPADVFMIPQYGYLTLNDGSQAVGRSSFYCLEYFPSQMLRTGNNFQFSYEFENVPFHSSYAHSQSLDRLMNPLIDQYLYYLSKTINGSGQNQQTLKFSVAGPSNMAVQGRNYIPGPSYRQQRVSTTVTQNNNSEFAWPRASSWALNGRNSLMNPGPAMASHKEGEDRFFPLSGSLIFGKQGTGRDNVDADKVMITNEEEIKTTNPVATESYGQVATNHQSAQAQAQTGWVQNQGILPGMVWQDRDVYLQGPIWAKIPHTDGNFHPSPLMGGFGMKHPPPQILIKNTPVPADPPTAFNKDKLNSFITQYSTGQVSVEIEWELQKENSKRWNPEIQYTSNLCKSNNVEFAVNTEGVYSEPRPIGTRYLTRNL

SEQ ID NO: 665 - protein, 736 aa, synthetic construct
MAADGYLPDWLEDNLSEGIREWWALKPGAPQPKANQQHQDNARGLVLPGYKYLGPGNGLDKGEPVNAADAAALEHDKAYDQQLKAGDNPYLKYNHADAEFQERLKEDTSFGGNLGRAVFQAKKRLLEPLGLVEEAAKTAPGKKRPVEQSPQEPDSSAGIGKSGAQPAKKRLNFGQTGDTESVPDPQPIGEPPAAPSGVGSLTMASGGGAPVADNNEGADGVGSSSGNWHCDSQWLGDRVITTSTRTWALPTYNNHLYKQISNSTSGGSSNDNAYFGYSTPWGYFDFNRFHCHFSPRDWQRLINNNWGFRPKRLNFKLFNIQVKEVTDNNGVKTIANNLTSTVQVFGDSDYQLPYVLGSAHEGCLPPFPADVFMIPQYGYLTLNDGSQAVGRSSFYCLEYFPSQMLRTGNNFQFSYEFENVPFHSSYAHSQSLDRLMNPLIDQYLYYLSKTINGSGQNQQTLKFSVAGPSNMAVQGRNYIPGPSYRQQRVSTTVTQNNNSEIAWPRASSWALNGRNSLMNPGPAMASHKEGEDRFFPLSGSLIFGKQGTGRDNVDADKVMITNEEEIKTTNPVATESYGQVATNHQSAQAQAQTGWVQNQGILPGMVWQDRDVYLQGPIWAKIPHTDGNFHPSPLMGGFGMKHPPPQILIKNTPVPADPPTAFNKDKLNSFITQYSTGQVSVEIEWELQKENSKRWNPEIQYTSNLCKSNNVEFAVNTEGVYSEPRPIGTRYLTRNL

SEQ ID NO: 666 - protein, 736 aa, synthetic construct
MAADGYLPDWLEDNLSEGIREWWALKPGAPQPKANQQHQDNARGLVLPGYKYLGPGNGLDKGEPVNAADAAALEHDKAYDQQLKAGDNPYLKYNHADAEFQERLKEDTSFGGNLGRAVFQAKKRLLEPLGLVEEAAKTAPGKKRPVEQSPQEPDSSAGIGKSGAQPAKKRLNFGQTGDTESVPDPQPIGEPPAAPSGVGSLTMASGGGAPVADNNEGADGVGSSSGNWHCDSQWLGDRVITTSTRTWALPTYNNHLYKQISNSTSGGSSNDNAYFGYSTPWGYFDFNRFHCHFSPRDWQRLINNNWGFRPKRLNFKLFNIQVKEVTDNNGVKTIANNLTSTVQVFADSDYQLPYVLGSAHEGCLPPFPADVFMIPQYGYLTLNDGSQAVGRSSFYCLEYFPSQMLRTGNNFQFSYEFENVPFHSSYAHSQSLDRLMNPLIDQYLYYLSKTINGSGQNQQTLKFSVAGPSNMAVQGRNYIPGPSYRQQRVSTTVTQNNNSEFAWPGASSWALNGRNSLMNPGPAMASHKEGEDRFFPLSGSLIFGKQGTGRDNVDADKVMITNEEEIKTTNPVATESYGQVATNHQSAQAQAQTGWVQNQGILPGMVWQDRDVYLQGPIWAKIPHTDGNFHPSPLMGGFGMKHPPPQILIKNTPVPADPPTAFNKDKLNSFITQYSTGQVSVEIEWELQKENSKRWNPEIQYTSNLYKSNNVEFAVNTEGVYSEPRPIGTRYLTRNL

SEQ ID NO: 667 - protein, 736 aa, synthetic construct
MAADGYLPDWLEDNLSEGIREWWALKPGAPQPKANQQHQDNARGLVLPGYKYLGPGNGLDKGEPVNAADAAALEHDKAYDQQLKAGDNPYLKYNHADAEFQERLKEDTSFGGNLGRAVFQAKKRLLEPLGLVEEAAKTAPGKKRPVEQSPQEPDSSAGIGKSGAQPAKKRLNFGQTGDTESVPDPQPIGEPPAAPSGVGSLTMASGGGAPVADNNEGADGVGSSSGNWHCDSQWLGDRVITTSTRTWALPTYNNHLYKQISNSTSGGSSNDNAYFGYSTPWGYFDFNRFHCHFSPRDWQRLINNNWGFRPKRLNFKLFNIQVKEVTDNNGVKTIANNLTSTVQVFADSDYQLPYVLGSAHEGCLPPFPADVFMIPQYGYLTLNDGSQAVGRSSFYCLEYFPSQMLRTGNNFQFSYEFENVPFHSSYAHSQSLDRLMNPLIDQYLYYLSKTINGSGQNQQTLKFSVAGPSNMAVQGRNYIPGPSYRQQRVSTTVTQNNNSEIAWPGASSWALNGRNSLMNPGPAMASHKEGEDRFFPLSGSLIFGKQGTGRDNVDADKVMITNEEEIKTTNPVATESYGQVATNHQSAQAQAQTGWVQNQGILPGMVWQDRDVYLQGPIWAKIPHTDGNFHPSPLMGGFGMKHPPPQILIKNTPVPADPPTAFNKDKLNSFITQYSTGQVSVEIEWELQKENSKRWNPEIQYTSNLYKSNNVEFAVNTEGVYSEPRPIGTRYLTRNL

SEQ ID NO: 668 - protein, 736 aa, synthetic construct
MAADGYLPDWLEDNLSEGIREWWALKPGAPQPKANQQHQDNARGLVLPGYKYLGPGNGLDKGEPVNAADAAALEHDKAYDQQLKAGDNPYLKYNHADAEFQERLKEDTSFGGNLGRAVFQAKKRLLEPLGLVEEAAKTAPGKKRPVEQSPQEPDSSAGIGKSGAQPAKKRLNFGQTGDTESVPDPQPIGEPPAAPSGVGSLTMASGGGAPVADNNEGADGVGSSSGNWHCDSQWLGDRVITTSTRTWALPTYNNHLYKQISNSTSGGSSNDNAYFGYSTPWGYFDFNRFHCHFSPRDWQRLINNNWGFRPKRLNFKLFNIQVKEVTDNNGVKTIANNLTSTVQVFADSDYQLPYVLGSAHEGCLPPFPADVFMIPQYGYLTLNDGSQAVGRSSFYCLEYFPSQMLRTGNNFQFSYEFENVPFHSSYAHSQSLDRLMNPLIDQYLYYLSKTINGSGQNQQTLKFSVAGPSNMAVQGRNYIPGPSYRQQRVSTTVTQNNNSEFAWPGASSWALNGRNSLMNPGPAMASHKEGEDRFFPLSGSLIFGKQGTGRDNVDADKVMITNEEEIKTTNPVATESYGQVATNHQSAQAQAQTGWVQNQGILPGMVWQDRDVYLQGPIWAKIPHTDGNFHPSPLMGGFGMKHPPPQILIKNTPVPADPPTAFNKDKLNSFITQYSTGQVSVEIEWELQKENSKRWNPEIQYTSNLCKSNNVEFAVNTEGVYSEPRPIGTRYLTRNL

SEQ ID NO: 669 - protein, 736 aa, synthetic construct
MAADGYLPDWLEDNLSEGIREWWALKPGAPQPKANQQHQDNARGLVLPGYKYLGPGNGLDKGEPVNAADAAALEHDKAYDQQLKAGDNPYLKYNHADAEFQERLKEDTSFGGNLGRAVFQAKKRLLEPLGLVEEAAKTAPGKKRPVEQSPQEPDSSAGIGKSGAQPAKKRLNFGQTGDTESVPDPQPIGEPPAAPSGVGSLTMASGGGAPVADNNEGADGVGSSSGNWHCDSQWLGDRVITTSTRTWALPTYNNHLYKQISNSTSGGSSNDNAYFGYSTPWGYFDFNRFHCHFSPRDWQRLINNNWGFRPKRLNFKLFNIQVKEVTDNNGVKTIANNLTSTVQVFADSDYQLPYVLGSAHEGCLPPFPADVFMIPQYGYLTLNDGSQAVGRSSFYCLEYFPSQMLRTGNNFQFSYEFENVPFHSSYAHSQSLDRLMNPLIDQYLYYLSKTINGSGQNQQTLKFSVAGPSNMAVQGRNYIPGPSYRQQRVSTTVTQNNNSEIAWPRASSWALNGRNSLMNPGPAMASHKEGEDRFFPLSGSLIFGKQGTGRDNVDADKVMITNEEEIKTTNPVATESYGQVATNHQSAQAQAQTGWVQNQGILPGMVWQDRDVYLQGPIWAKIPHTDGNFHPSPLMGGFGMKHPPPQILIKNTPVPADPPTAFNKDKLNSFITQYSTGQVSVEIEWELQKENSKRWNPEIQYTSNLYKSNNVEFAVNTEGVYSEPRPIGTRYLTRNL

SEQ ID NO: 670 - protein, 736 aa, synthetic construct
MAADGYLPDWLEDNLSEGIREWWALKPGAPQPKANQQHQDNARGLVLPGYKYLGPGNGLDKGEPVNAADAAALEHDKAYDQQLKAGDNPYLKYNHADAEFQERLKEDTSFGGNLGRAVFQAKKRLLEPLGLVEEAAKTAPGKKRPVEQSPQEPDSSAGIGKSGAQPAKKRLNFGQTGDTESVPDPQPIGEPPAAPSGVGSLTMASGGGAPVADNNEGADGVGSSSGNWHCDSQWLGDRVITTSTRTWALPTYNNHLYKQISNSTSGGSSNDNAYFGYSTPWGYFDFNRFHCHFSPRDWQRLINNNWGFRPKRLNFKLFNIQVKEVTDNNGVKTIANNLTSTVQVFADSDYQLPYVLGSAHEGCLPPFPADVFMIPQYGYLTLNDGSQAVGRSSFYCLEYFPSQMLRTGNNFQFSYEFENVPFHSSYAHSQSLDRLMNPLIDQYLYYLSKTINGSGQNQQTLKFSVAGPSNMAVQGRNYIPGPSYRQQRVSTTVTQNNNSEIAWPGASSWALNGRNSLMNPGPAMASHKEGEDRFFPLSGSLIFGKQGTGRDNVDADKVMITNEEEIKTTNPVATESYGQVATNHQSAQAQAQTGWVQNQGILPGMVWQDRDVYLQGPIWAKIPHTDGNFHPSPLMGGFGMKHPPPQILIKNTPVPADPPTAFNKDKLNSFITQYSTGQVSVEIEWELQKENSKRWNPEIQYTSNLCKSNNVEFAVNTEGVYSEPRPIGTRYLTRNL

SEQ ID NO: 671 - protein, 736 aa, synthetic construct
MAADGYLPDWLEDNLSEGIREWWALKPGAPQPKANQQHQDNARGLVLPGYKYLGPGNGLDKGEPVNAADAAALEHDKAYDQQLKAGDNPYLKYNHADAEFQERLKEDTSFGGNLGRAVFQAKKRLLEPLGLVEEAAKTAPGKKRPVEQSPQEPDSSAGIGKSGAQPAKKRLNFGQTGDTESVPDPQPIGEPPAAPSGVGSLTMASGGGAPVADNNEGADGVGSSSGNWHCDSQWLGDRVITTSTRTWALPTYNNHLYKQISNSTSGGSSNDNAYFGYSTPWGYFDFNRFHCHFSPRDWQRLINNNWGFRPKRLNFKLFNIQVKEVTDNNGVKTIANNLTSTVQVFADSDYQLPYVLGSAHEGCLPPFPADVFMIPQYGYLTLNDGSQAVGRSSFYCLEYFPSQMLRTGNNFQFSYEFENVPFHSSYAHSQSLDRLMNPLIDQYLYYLSKTINGSGQNQQTLKFSVAGPSNMAVQGRNYIPGPSYRQQRVSTTVTQNNNSEFAWPRASSWALNGRNSLMNPGPAMASHKEGEDRFFPLSGSLIFGKQGTGRDNVDADKVMITNEEEIKTTNPVATESYGQVATNHQSAQAQAQTGWVQNQGILPGMVWQDRDVYLQGPIWAKIPHTDGNFHPSPLMGGFGMKHPPPQILIKNTPVPADPPTAFNKDKLNSFITQYSTGQVSVEIEWELQKENSKRWNPEIQYTSNLCKSNNVEFAVNTEGVYSEPRPIGTRYLTRNL

SEQ ID NO: 672 - protein, 736 aa, synthetic construct
MAADGYLPDWLEDNLSEGIREWWALKPGAPQPKANQQHQDNARGLVLPGYKYLGPGNGLDKGEPVNAADAAALEHDKAYDQQLKAGDNPYLKYNHADAEFQERLKEDTSFGGNLGRAVFQAKKRLLEPLGLVEEAAKTAPGKKRPVEQSPQEPDSSAGIGKSGAQPAKKRLNFGQTGDTESVPDPQPIGEPPAAPSGVGSLTMASGGGAPVADNNEGADGVGSSSGNWHCDSQWLGDRVITTSTRTWALPTYNNHLYKQISNSTSGGSSNDNAYFGYSTPWGYFDFNRFHCHFSPRDWQRLINNNWGFRPKRLNFKLFNIQVKEVTDNNGVKTIANNLTSTVQVFADSDYQLPYVLGSAHEGCLPPFPADVFMIPQYGYLTLNDGSQAVGRSSFYCLEYFPSQMLRTGNNFQFSYEFENVPFHSSYAHSQSLDRLMNPLIDQYLYYLSKTINGSGQNQQTLKFSVAGPSNMAVQGRNYIPGPSYRQQRVSTTVTQNNNSEIAWPRASSWALNGRNSLMNPGPAMASHKEGEDRFFPLSGSLIFGKQGTGRDNVDADKVMITNEEEIKTTNPVATESYGQVATNHQSAQAQAQTGWVQNQGILPGMVWQDRDVYLQGPIWAKIPHTDGNFHPSPLMGGFGMKHPPPQILIKNTPVPADPPTAFNKDKLNSFITQYSTGQVSVEIEWELQKENSKRWNPEIQYTSNLCKSNNVEFAVNTEGVYSEPRPIGTRYLTRNL

SEQ ID NO: 673 - protein, 736 aa, synthetic construct
MAADGYLPDWLEDTLSEGIRQWWKLKPGPPPPKPAERHKDDSRGLVLPGYKYLGPGNGLDKGEPVNAADAAALEHDKAYDQQLKAGDNPYLKYNHADAEFQERLKEDTSFGGNLGRAVFQAKKRLLEPLGLVEEAAKTAPGKKRPVEQSPQEPDSSAGIGKSGSQPAKKKLNFGQTGDTESVPDPQPIGEPPAAPSGVGSLTMASGGGAPVADNNEGADGVGSSSGNWHCDSQWLGDRVITTSTRTWALPTYNNHLYKQISNSTSGGSSNDNAYFGYSTPWGYFDFNRFHCHFSPRDWQRLINNNWGFRPKRLNFKLFNIQVKEVTDNNGVKTIANNLTSTVQVFGDSDYQLPYVLGSAHEGCLPPFPADVFMIPQYGYLTLNDGSQAVGRSSFYCLEYFPSQMLRTGNNFQFSYEFENVPFHSSYAHSQSLDRLMNPLIDQYLYYLSKTINGSGQNQQTLKFSVAGPSNMAVQGRNYIPGPSYRQQRVSTTVTQNNNSEFAWPGASSWALNGRNSLMNPGPAMASHKEGEDRFFPLSGSLIFGKQGTGRDNVDADKVMITNEEEIKTTNPVATESYGQVATNHQSAQAQAQTGWVQNQGILPGMVWQDRDVYLQGPIWAKIPHTDGNFHPSPLMGGFGMKHPPPQILIKNTPVPADPPTAFNKDKLNSFITQYSTGQVSVEIEWELQKENSKRWNPEIQYTSNYYKSNNVEFAVNTEGVYSEPRPIGTRYLTRNL

SEQ ID NO: 674 - protein, 736 aa, synthetic construct
MAADGYLPDWLEDTLSEGIRQWWKLKPGPPPPKPAERHKDDSRGLVLPGYKYLGPGNGLDKGEPVNAADAAALEHDKAYDQQLKAGDNPYLKYNHADAEFQERLKEDTSFGGNLGRAVFQAKKRLLEPLGLVEEAAKTAPGKKRPVEQSPQEPDSSAGIGKSGSQPAKKKLNFGQTGDTESVPDPQPIGEPPAAPSGVGSLTMASGGGAPVADNNEGADGVGSSSGNWHCDSQWLGDRVITTSTRTWALPTYNNHLYKQISNSTSGGSSNDNAYFGYSTPWGYFDFNRFHCHFSPRDWQRLINNNWGFRPKRLNFKLFNIQVKEVTDNNGVKTIANNLTSTVQVFGDSDYQLPYVLGSAHEGCLPPFPADVFMIPQYGYLTLNDGSQAVGRSSFYCLEYFPSQMLRTGNNFQFSYEFENVPFHSSYAHSQSLDRLMNPLIDQYLYYLSKTINGSGQNQQTLKFSVAGPSNMAVQGRNYIPGPSYRQQRVSTTVTQNNNSEIAWPGASSWALNGRNSLMNPGPAMASHKEGEDRFFPLSGSLIFGKQGTGRDNVDADKVMITNEEEIKTTNPVATESYGQVATNHQSAQAQAQTGWVQNQGILPGMVWQDRDVYLQGPIWAKIPHTDGNFHPSPLMGGFGMKHPPPQILIKNTPVPADPPTAFNKDKLNSFITQYSTGQVSVEIEWELQKENSKRWNPEIQYTSNYYKSNNVEFAVNTEGVYSEPRPIGTRYLTRNL

SEQ ID NO: 675 - protein, 736 aa, synthetic construct
MAADGYLPDWLEDTLSEGIRQWWKLKPGPPPPKPAERHKDDSRGLVLPGYKYLGPGNGLDKGEPVNAADAAALEHDKAYDQQLKAGDNPYLKYNHADAEFQERLKEDTSFGGNLGRAVFQAKKRLLEPLGLVEEAAKTAPGKKRPVEQSPQEPDSSAGIGKSGSQPAKKKLNFGQTGDTESVPDPQPIGEPPAAPSGVGSLTMASGGGAPVADNNEGADGVGSSSGNWHCDSQWLGDRVITTSTRTWALPTYNNHLYKQISNSTSGGSSNDNAYFGYSTPWGYFDFNRFHCHFSPRDWQRLINNNWGFRPKRLNFKLFNIQVKEVTDNNGVKTIANNLTSTVQVFGDSDYQLPYVLGSAHEGCLPPFPADVFMIPQYGYLTLNDGSQAVGRSSFYCLEYFPSQMLRTGNNFQFSYEFENVPFHSSYAHSQSLDRLMNPLIDQYLYYLSKTINGSGQNQQTLKFSVAGPSNMAVQGRNYIPGPSYRQQRVSTTVTQNNNSEFAWPRASSWALNGRNSLMNPGPAMASHKEGEDRFFPLSGSLIFGKQGTGRDNVDADKVMITNEEEIKTTNPVATESYGQVATNHQSAQAQAQTGWVQNQGILPGMVWQDRDVYLQGPIWAKIPHTDGNFHPSPLMGGFGMKHPPPQILIKNTPVPADPPTAFNKDKLNSFITQYSTGQVSVEIEWELQKENSKRWNPEIQYTSNYYKSNNVEFAVNTEGVYSEPRPIGTRYLTRNL

SEQ ID NO: 676 - protein, 736 aa, synthetic construct
MAADGYLPDWLEDTLSEGIRQWWKLKPGPPPPKPAERHKDDSRGLVLPGYKYLGPGNGLDKGEPVNAADAAALEHDKAYDQQLKAGDNPYLKYNHADAEFQERLKEDTSFGGNLGRAVFQAKKRLLEPLGLVEEAAKTAPGKKRPVEQSPQEPDSSAGIGKSGSQPAKKKLNFGQTGDTESVPDPQPIGEPPAAPSGVGSLTMASGGGAPVADNNEGADGVGSSSGNWHCDSQWLGDRVITTSTRTWALPTYNNHLYKQISNSTSGGSSNDNAYFGYSTPWGYFDFNRFHCHFSPRDWQRLINNNWGFRPKRLNFKLFNIQVKEVTDNNGVKTIANNLTSTVQVFGDSDYQLPYVLGSAHEGCLPPFPADVFMIPQYGYLTLNDGSQAVGRSSFYCLEYFPSQMLRTGNNFQFSYEFENVPFHSSYAHSQSLDRLMNPLIDQYLYYLSKTINGSGQNQQTLKFSVAGPSNMAVQGRNYIPGPSYRQQRVSTTVTQNNNSEFAWPGASSWALNGRNSLMNPGPAMASHKEGEDRFFPLSGSLIFGKQGTGRDNVDADKVMITNEEEIKTTNPVATESYGQVATNHQSAQAQAQTGWVQNQGILPGMVWQDRDVYLQGPIWAKIPHTDGNFHPSPLMGGFGMKHPPPQILIKNTPVPADPPTAFNKDKLNSFITQYSTGQVSVEIEWELQKENSKRWNPEIQYTSNYCKSNNVEFAVNTEGVYSEPRPIGTRYLTRNL

SEQ ID NO: 677 - protein, 736 aa, synthetic construct
MAADGYLPDWLEDTLSEGIRQWWKLKPGPPPPKPAERHKDDSRGLVLPGYKYLGPGNGLDKGEPVNAADAAALEHDKAYDQQLKAGDNPYLKYNHADAEFQERLKEDTSFGGNLGRAVFQAKKRLLEPLGLVEEAAKTAPGKKRPVEQSPQEPDSSAGIGKSGSQPAKKKLNFGQTGDTESVPDPQPIGEPPAAPSGVGSLTMASGGGAPVADNNEGADGVGSSSGNWHCDSQWLGDRVITTSTRTWALPTYNNHLYKQISNSTSGGSSNDNAYFGYSTPWGYFDFNRFHCHFSPRDWQRLINNNWGFRPKRLNFKLFNIQVKEVTDNNGVKTIANNLTSTVQVFGDSDYQLPYVLGSAHEGCLPPFPADVFMIPQYGYLTLNDGSQAVGRSSFYCLEYFPSQMLRTGNNFQFSYEFENVPFHSSYAHSQSLDRLMNPLIDQYLYYLSKTINGSGQNQQTLKFSVAGPSNMAVQGRNYIPGPSYRQQRVSTTVTQNNNSEIAWPRASSWALNGRNSLMNPGPAMASHKEGEDRFFPLSGSLIFGKQGTGRDNVDADKVMITNEEEIKTTNPVATESYGQVATNHQSAQAQAQTGWVQNQGILPGMVWQDRDVYLQGPIWAKIPHTDGNFHPSPLMGGFGMKHPPPQILIKNTPVPADPPTAFNKDKLNSFITQYSTGQVSVEIEWELQKENSKRWNPEIQYTSNYYKSNNVEFAVNTEGVYSEPRPIGTRYLTRNL

SEQ ID NO: 678 - protein, 736 aa, synthetic construct
MAADGYLPDWLEDTLSEGIRQWWKLKPGPPPPKPAERHKDDSRGLVLPGYKYLGPGNGLDKGEPVNAADAAALEHDKAYDQQLKAGDNPYLKYNHADAEFQERLKEDTSFGGNLGRAVFQAKKRLLEPLGLVEEAAKTAPGKKRPVEQSPQEPDSSAGIGKSGSQPAKKKLNFGQTGDTESVPDPQPIGEPPAAPSGVGSLTMASGGGAPVADNNEGADGVGSSSGNWHCDSQWLGDRVITTSTRTWALPTYNNHLYKQISNSTSGGSSNDNAYFGYSTPWGYFDFNRFHCHFSPRDWQRLINNNWGFRPKRLNFKLFNIQVKEVTDNNGVKTIANNLTSTVQVFGDSDYQLPYVLGSAHEGCLPPFPADVFMIPQYGYLTLNDGSQAVGRSSFYCLEYFPSQMLRTGNNFQFSYEFENVPFHSSYAHSQSLDRLMNPLIDQYLYYLSKTINGSGQNQQTLKFSVAGPSNMAVQGRNYIPGPSYRQQRVSTTVTQNNNSEIAWPGASSWALNGRNSLMNPGPAMASHKEGEDRFFPLSGSLIFGKQGTGRDNVDADKVMITNEEEIKTTNPVATESYGQVATNHQSAQAQAQTGWVQNQGILPGMVWQDRDVYLQGPIWAKIPHTDGNFHPSPLMGGFGMKHPPPQILIKNTPVPADPPTAFNKDKLNSFITQYSTGQVSVEIEWELQKENSKRWNPEIQYTSNYCKSNNVEFAVNTEGVYSEPRPIGTRYLTRNL

SEQ ID NO: 679 - protein, 736 aa, synthetic construct
MAADGYLPDWLEDTLSEGIRQWWKLKPGPPPPKPAERHKDDSRGLVLPGYKYLGPGNGLDKGEPVNAADAAALEHDKAYDQQLKAGDNPYLKYNHADAEFQERLKEDTSFGGNLGRAVFQAKKRLLEPLGLVEEAAKTAPGKKRPVEQSPQEPDSSAGIGKSGSQPAKKKLNFGQTGDTESVPDPQPIGEPPAAPSGVGSLTMASGGGAPVADNNEGADGVGSSSGNWHCDSQWLGDRVITTSTRTWALPTYNNHLYKQISNSTSGGSSNDNAYFGYSTPWGYFDFNRFHCHFSPRDWQRLINNNWGFRPKRLNFKLFNIQVKEVTDNNGVKTIANNLTSTVQVFGDSDYQLPYVLGSAHEGCLPPFPADVFMIPQYGYLTLNDGSQAVGRSSFYCLEYFPSQMLRTGNNFQFSYEFENVPFHSSYAHSQSLDRLMNPLIDQYLYYLSKTINGSGQNQQTLKFSVAGPSNMAVQGRNYIPGPSYRQQRVSTTVTQNNNSEFAWPRASSWALNGRNSLMNPGPAMASHKEGEDRFFPLSGSLIFGKQGTGRDNVDADKVMITNEEEIKTTNPVATESYGQVATNHQSAQAQAQTGWVQNQGILPGMVWQDRDVYLQGPIWAKIPHTDGNFHPSPLMGGFGMKHPPPQILIKNTPVPADPPTAFNKDKLNSFITQYSTGQVSVEIEWELQKENSKRWNPEIQYTSNYCKSNNVEFAVNTEGVYSEPRPIGTRYLTRNL

SEQ ID NO: 680 - protein, 736 aa, synthetic construct
MAADGYLPDWLEDTLSEGIRQWWKLKPGPPPPKPAERHKDDSRGLVLPGYKYLGPGNGLDKGEPVNAADAAALEHDKAYDQQLKAGDNPYLKYNHADAEFQERLKEDTSFGGNLGRAVFQAKKRLLEPLGLVEEAAKTAPGKKRPVEQSPQEPDSSAGIGKSGSQPAKKKLNFGQTGDTESVPDPQPIGEPPAAPSGVGSLTMASGGGAPVADNNEGADGVGSSSGNWHCDSQWLGDRVITTSTRTWALPTYNNHLYKQISNSTSGGSSNDNAYFGYSTPWGYFDFNRFHCHFSPRDWQRLINNNWGFRPKRLNFKLFNIQVKEVTDNNGVKTIANNLTSTVQVFGDSDYQLPYVLGSAHEGCLPPFPADVFMIPQYGYLTLNDGSQAVGRSSFYCLEYFPSQMLRTGNNFQFSYEFENVPFHSSYAHSQSLDRLMNPLIDQYLYYLSKTINGSGQNQQTLKFSVAGPSNMAVQGRNYIPGPSYRQQRVSTTVTQNNNSEIAWPRASSWALNGRNSLMNPGPAMASHKEGEDRFFPLSGSLIFGKQGTGRDNVDADKVMITNEEEIKTTNPVATESYGQVATNHQSAQAQAQTGWVQNQGILPGMVWQDRDVYLQGPIWAKIPHTDGNFHPSPLMGGFGMKHPPPQILIKNTPVPADPPTAFNKDKLNSFITQYSTGQVSVEIEWELQKENSKRWNPEIQYTSNYCKSNNVEFAVNTEGVYSEPRPIGTRYLTRNL

SEQ ID NO: 681 - protein, 736 aa, synthetic construct
MAADGYLPDWLEDTLSEGIRQWWKLKPGPPPPKPAERHKDDSRGLVLPGYKYLGPGNGLDKGEPVNAADAAALEHDKAYDQQLKAGDNPYLKYNHADAEFQERLKEDTSFGGNLGRAVFQAKKRLLEPLGLVEEAAKTAPGKKRPVEQSPQEPDSSAGIGKSGSQPAKKKLNFGQTGDTESVPDPQPIGEPPAAPSGVGSLTMASGGGAPVADNNEGADGVGSSSGNWHCDSQWLGDRVITTSTRTWALPTYNNHLYKQISNSTSGGSSNDNAYFGYSTPWGYFDFNRFHCHFSPRDWQRLINNNWGFRPKRLNFKLFNIQVKEVTDNNGVKTIANNLTSTVQVFTDSDYQLPYVLGSAHEGCLPPFPADVFMIPQYGYLTLNDGSQAVGRSSFYCLEYFPSQMLRTGNNFQFSYEFENVPFHSSYAHSQSLDRLMNPLIDQYLYYLSKTINGSGQNQQTLKFSVAGPSNMAVQGRNYIPGPSYRQQRVSTTVTQNNNSEFAWPGASSWALNGRNSLMNPGPAMASHKEGEDRFFPLSGSLIFGKQGTGRDNVDADKVMITNEEEIKTTNPVATESYGQVATNHQSAQAQAQTGWVQNQGILPGMVWQDRDVYLQGPIWAKIPHTDGNFHPSPLMGGFGMKHPPPQILIKNTPVPADPPTAFNKDKLNSFITQYSTGQVSVEIEWELQKENSKRWNPEIQYTSNLYKSNNVEFAVNTEGVYSEPRPIGTRYLTRNL

SEQ ID NO: 682 - protein, 736 aa, synthetic construct
MAADGYLPDWLEDTLSEGIRQWWKLKPGPPPPKPAERHKDDSRGLVLPGYKYLGPGNGLDKGEPVNAADAAALEHDKAYDQQLKAGDNPYLKYNHADAEFQERLKEDTSFGGNLGRAVFQAKKRLLEPLGLVEEAAKTAPGKKRPVEQSPQEPDSSAGIGKSGSQPAKKKLNFGQTGDTESVPDPQPIGEPPAAPSGVGSLTMASGGGAPVADNNEGADGVGSSSGNWHCDSQWLGDRVITTSTRTWALPTYNNHLYKQISNSTSGGSSNDNAYFGYSTPWGYFDFNRFHCHFSPRDWQRLINNNWGFRPKRLNFKLFNIQVKEVTDNNGVKTIANNLTSTVQVFTDSDYQLPYVLGSAHEGCLPPFPADVFMIPQYGYLTLNDGSQAVGRSSFYCLEYFPSQMLRTGNNFQFSYEFENVPFHSSYAHSQSLDRLMNPLIDQYLYYLSKTINGSGQNQQTLKFSVAGPSNMAVQGRNYIPGPSYRQQRVSTTVTQNNNSEIAWPGASSWALNGRNSLMNPGPAMASHKEGEDRFFPLSGSLIFGKQGTGRDNVDADKVMITNEEEIKTTNPVATESYGQVATNHQSAQAQAQTGWVQNQGILPGMVWQDRDVYLQGPIWAKIPHTDGNFHPSPLMGGFGMKHPPPQILIKNTPVPADPPTAFNKDKLNSFITQYSTGQVSVEIEWELQKENSKRWNPEIQYTSNLYKSNNVEFAVNTEGVYSEPRPIGTRYLTRNL

SEQ ID NO: 683 - protein, 736 aa, synthetic construct
MAADGYLPDWLEDTLSEGIRQWWKLKPGPPPPKPAERHKDDSRGLVLPGYKYLGPGNGLDKGEPVNAADAAALEHDKAYDQQLKAGDNPYLKYNHADAEFQERLKEDTSFGGNLGRAVFQAKKRLLEPLGLVEEAAKTAPGKKRPVEQSPQEPDSSAGIGKSGSQPAKKKLNFGQTGDTESVPDPQPIGEPPAAPSGVGSLTMASGGGAPVADNNEGADGVGSSSGNWHCDSQWLGDRVITTSTRTWALPTYNNHLYKQISNSTSGGSSNDNAYFGYSTPWGYFDFNRFHCHFSPRDWQRLINNNWGFRPKRLNFKLFNIQVKEVTDNNGVKTIANNLTSTVQVFTDSDYQLPYVLGSAHEGCLPPFPADVFMIPQYGYLTLNDGSQAVGRSSFYCLEYFPSQMLRTGNNFQFSYEFENVPFHSSYAHSQSLDRLMNPLIDQYLYYLSKTINGSGQNQQTLKFSVAGPSNMAVQGRNYIPGPSYRQQRVSTTVTQNNNSEFAWPRASSWALNGRNSLMNPGPAMASHKEGEDRFFPLSGSLIFGKQGTGRDNVDADKVMITNEEEIKTTNPVATESYGQVATNHQSAQAQAQTGWVQNQGILPGMVWQDRDVYLQGPIWAKIPHTDGNFHPSPLMGGFGMKHPPPQILIKNTPVPADPPTAFNKDKLNSFITQYSTGQVSVEIEWELQKENSKRWNPEIQYTSNLYKSNNVEFAVNTEGVYSEPRPIGTRYLTRNL

SEQ ID NO: 684 - protein, 736 aa, synthetic construct
MAADGYLPDWLEDTLSEGIRQWWKLKPGPPPPKPAERHKDDSRGLVLPGYKYLGPGNGLDKGEPVNAADAAALEHDKAYDQQLKAGDNPYLKYNHADAEFQERLKEDTSFGGNLGRAVFQAKKRLLEPLGLVEEAAKTAPGKKRPVEQSPQEPDSSAGIGKSGSQPAKKKLNFGQTGDTESVPDPQPIGEPPAAPSGVGSLTMASGGGAPVADNNEGADGVGSSSGNWHCDSQWLGDRVITTSTRTWALPTYNNHLYKQISNSTSGGSSNDNAYFGYSTPWGYFDFNRFHCHFSPRDWQRLINNNWGFRPKRLNFKLFNIQVKEVTDNNGVKTIANNLTSTVQVFTDSDYQLPYVLGSAHEGCLPPFPADVFMIPQYGYLTLNDGSQAVGRSSFYCLEYFPSQMLRTGNNFQFSYEFENVPFHSSYAHSQSLDRLMNPLIDQYLYYLSKTINGSGQNQQTLKFSVAGPSNMAVQGRNYIPGPSYRQQRVSTTVTQNNNSEFAWPGASSWALNGRNSLMNPGPAMASHKEGEDRFFPLSGSLIFGKQGTGRDNVDADKVMITNEEEIKTTNPVATESYGQVATNHQSAQAQAQTGWVQNQGILPGMVWQDRDVYLQGPIWAKIPHTDGNFHPSPLMGGFGMKHPPPQILIKNTPVPADPPTAFNKDKLNSFITQYSTGQVSVEIEWELQKENSKRWNPEIQYTSNLCKSNNVEFAVNTEGVYSEPRPIGTRYLTRNL

SEQ ID NO: 685 - protein, 736 aa, synthetic construct
MAADGYLPDWLEDTLSEGIRQWWKLKPGPPPPKPAERHKDDSRGLVLPGYKYLGPGNGLDKGEPVNAADAAALEHDKAYDQQLKAGDNPYLKYNHADAEFQERLKEDTSFGGNLGRAVFQAKKRLLEPLGLVEEAAKTAPGKKRPVEQSPQEPDSSAGIGKSGSQPAKKKLNFGQTGDTESVPDPQPIGEPPAAPSGVGSLTMASGGGAPVADNNEGADGVGSSSGNWHCDSQWLGDRVITTSTRTWALPTYNNHLYKQISNSTSGGSSNDNAYFGYSTPWGYFDFNRFHCHFSPRDWQRLINNNWGFRPKRLNFKLFNIQVKEVTDNNGVKTIANNLTSTVQVFTDSDYQLPYVLGSAHEGCLPPFPADVFMIPQYGYLTLNDGSQAVGRSSFYCLEYFPSQMLRTGNNFQFSYEFENVPFHSSYAHSQSLDRLMNPLIDQYLYYLSKTINGSGQNQQTLKFSVAGPSNMAVQGRNYIPGPSYRQQRVSTTVTQNNNSEIAWPRASSWALNGRNSLMNPGPAMASHKEGEDRFFPLSGSLIFGKQGTGRDNVDADKVMITNEEEIKTTNPVATESYGQVATNHQSAQAQAQTGWVQNQGILPGMVWQDRDVYLQGPIWAKIPHTDGNFHPSPLMGGFGMKHPPPQILIKNTPVPADPPTAFNKDKLNSFITQYSTGQVSVEIEWELQKENSKRWNPEIQYTSNLYKSNNVEFAVNTEGVYSEPRPIGTRYLTRNL

SEQ ID NO: 686 - protein, 736 aa, synthetic construct
MAADGYLPDWLEDTLSEGIRQWWKLKPGPPPPKPAERHKDDSRGLVLPGYKYLGPGNGLDKGEPVNAADAAALEHDKAYDQQLKAGDNPYLKYNHADAEFQERLKEDTSFGGNLGRAVFQAKKRLLEPLGLVEEAAKTAPGKKRPVEQSPQEPDSSAGIGKSGSQPAKKKLNFGQTGDTESVPDPQPIGEPPAAPSGVGSLTMASGGGAPVADNNEGADGVGSSSGNWHCDSQWLGDRVITTSTRTWALPTYNNHLYKQISNSTSGGSSNDNAYFGYSTPWGYFDFNRFHCHFSPRDWQRLINNNWGFRPKRLNFKLFNIQVKEVTDNNGVKTIANNLTSTVQVFTDSDYQLPYVLGSAHEGCLPPFPADVFMIPQYGYLTLNDGSQAVGRSSFYCLEYFPSQMLRTGNNFQFSYEFENVPFHSSYAHSQSLDRLMNPLIDQYLYYLSKTINGSGQNQQTLKFSVAGPSNMAVQGRNYIPGPSYRQQRVSTTVTQNNNSEIAWPGASSWALNGRNSLMNPGPAMASHKEGEDRFFPLSGSLIFGKQGTGRDNVDADKVMITNEEEIKTTNPVATESYGQVATNHQSAQAQAQTGWVQNQGILPGMVWQDRDVYLQGPIWAKIPHTDGNFHPSPLMGGFGMKHPPPQILIKNTPVPADPPTAFNKDKLNSFITQYSTGQVSVEIEWELQKENSKRWNPEIQYTSNLCKSNNVEFAVNTEGVYSEPRPIGTRYLTRNL

SEQ ID NO: 687 - protein, 736 aa, synthetic construct
MAADGYLPDWLEDTLSEGIRQWWKLKPGPPPPKPAERHKDDSRGLVLPGYKYLGPGNGLDKGEPVNAADAAALEHDKAYDQQLKAGDNPYLKYNHADAEFQERLKEDTSFGGNLGRAVFQAKKRLLEPLGLVEEAAKTAPGKKRPVEQSPQEPDSSAGIGKSGSQPAKKKLNFGQTGDTESVPDPQPIGEPPAAPSGVGSLTMASGGGAPVADNNEGADGVGSSSGNWHCDSQWLGDRVITTSTRTWALPTYNNHLYKQISNSTSGGSSNDNAYFGYSTPWGYFDFNRFHCHFSPRDWQRLINNNWGFRPKRLNFKLFNIQVKEVTDNNGVKTIANNLTSTVQVFTDSDYQLPYVLGSAHEGCLPPFPADVFMIPQYGYLTLNDGSQAVGRSSFYCLEYFPSQMLRTGNNFQFSYEFENVPFHSSYAHSQSLDRLMNPLIDQYLYYLSKTINGSGQNQQTLKFSVAGPSNMAVQGRNYIPGPSYRQQRVSTTVTQNNNSEFAWPRASSWALNGRNSLMNPGPAMASHKEGEDRFFPLSGSLIFGKQGTGRDNVDADKVMITNEEEIKTTNPVATESYGQVATNHQSAQAQAQTGWVQNQGILPGMVWQDRDVYLQGPIWAKIPHTDGNFHPSPLMGGFGMKHPPPQILIKNTPVPADPPTAFNKDKLNSFITQYSTGQVSVEIEWELQKENSKRWNPEIQYTSNLCKSNNVEFAVNTEGVYSEPRPIGTRYLTRNL

SEQ ID NO: 688 - protein, 736 aa, synthetic construct
MAADGYLPDWLEDTLSEGIRQWWKLKPGPPPPKPAERHKDDSRGLVLPGYKYLGPGNGLDKGEPVNAADAAALEHDKAYDQQLKAGDNPYLKYNHADAEFQERLKEDTSFGGNLGRAVFQAKKRLLEPLGLVEEAAKTAPGKKRPVEQSPQEPDSSAGIGKSGSQPAKKKLNFGQTGDTESVPDPQPIGEPPAAPSGVGSLTMASGGGAPVADNNEGADGVGSSSGNWHCDSQWLGDRVITTSTRTWALPTYNNHLYKQISNSTSGGSSNDNAYFGYSTPWGYFDFNRFHCHFSPRDWQRLINNNWGFRPKRLNFKLFNIQVKEVTDNNGVKTIANNLTSTVQVFTDSDYQLPYVLGSAHEGCLPPFPADVFMIPQYGYLTLNDGSQAVGRSSFYCLEYFPSQMLRTGNNFQFSYEFENVPFHSSYAHSQSLDRLMNPLIDQYLYYLSKTINGSGQNQQTLKFSVAGPSNMAVQGRNYIPGPSYRQQRVSTTVTQNNNSEIAWPRASSWALNGRNSLMNPGPAMASHKEGEDRFFPLSGSLIFGKQGTGRDNVDADKVMITNEEEIKTTNPVATESYGQVATNHQSAQAQAQTGWVQNQGILPGMVWQDRDVYLQGPIWAKIPHTDGNFHPSPLMGGFGMKHPPPQILIKNTPVPADPPTAFNKDKLNSFITQYSTGQVSVEIEWELQKENSKRWNPEIQYTSNLCKSNNVEFAVNTEGVYSEPRPIGTRYLTRNL

SEQ ID NO: 689 - protein, 736 aa, synthetic construct
MAADGYLPDWLEDTLSEGIRQWWKLKPGPPPPKPAERHKDDSRGLVLPGYKYLGPGNGLDKGEPVNAADAAALEHDKAYDQQLKAGDNPYLKYNHADAEFQERLKEDTSFGGNLGRAVFQAKKRLLEPLGLVEEAAKTAPGKKRPVEQSPQEPDSSAGIGKSGSQPAKKKLNFGQTGDTESVPDPQPIGEPPAAPSGVGSLTMASGGGAPVADNNEGADGVGSSSGNWHCDSQWLGDRVITTSTRTWALPTYNNHLYKQISNSTSGGSSNDNAYFGYSTPWGYFDFNRFHCHFSPRDWQRLINNNWGFRPKRLNFKLFNIQVKEVTDNNGVKTIANNLTSTVQVFGDSDYQLPYVLGSAHEGCLPPFPADVFMIPQYGYLTLNDGSQAVGRSSFYCLEYFPSQMLRTGNNFQFSYEFENVPFHSSYAHSQSLDRLMNPLIDQYLYYLSKTINGSGQNQQTLKFSVAGPSNMAVQGRNYIPGPSYRQQRVSTTVTQNNNSEFAWPGASSWALNGRNSLMNPGPAMASHKEGEDRFFPLSGSLIFGKQGTGRDNVDADKVMITNEEEIKTTNPVATESYGQVATNHQSAQAQAQTGWVQNQGILPGMVWQDRDVYLQGPIWAKIPHTDGNFHPSPLMGGFGMKHPPPQILIKNTPVPADPPTAFNKDKLNSFITQYSTGQVSVEIEWELQKENSKRWNPEIQYTSNLYKSNNVEFAVNTEGVYSEPRPIGTRYLTRNL

SEQ ID NO: 690 - protein, 736 aa, synthetic construct
MAADGYLPDWLEDTLSEGIRQWWKLKPGPPPPKPAERHKDDSRGLVLPGYKYLGPGNGLDKGEPVNAADAAALEHDKAYDQQLKAGDNPYLKYNHADAEFQERLKEDTSFGGNLGRAVFQAKKRLLEPLGLVEEAAKTAPGKKRPVEQSPQEPDSSAGIGKSGSQPAKKKLNFGQTGDTESVPDPQPIGEPPAAPSGVGSLTMASGGGAPVADNNEGADGVGSSSGNWHCDSQWLGDRVITTSTRTWALPTYNNHLYKQISNSTSGGSSNDNAYFGYSTPWGYFDFNRFHCHFSPRDWQRLINNNWGFRPKRLNFKLFNIQVKEVTDNNGVKTIANNLTSTVQVFGDSDYQLPYVLGSAHEGCLPPFPADVFMIPQYGYLTLNDGSQAVGRSSFYCLEYFPSQMLRTGNNFQFSYEFENVPFHSSYAHSQSLDRLMNPLIDQYLYYLSKTINGSGQNQQTLKFSVAGPSNMAVQGRNYIPGPSYRQQRVSTTVTQNNNSEIAWPGASSWALNGRNSLMNPGPAMASHKEGEDRFFPLSGSLIFGKQGTGRDNVDADKVMITNEEEIKTTNPVATESYGQVATNHQSAQAQAQTGWVQNQGILPGMVWQDRDVYLQGPIWAKIPHTDGNFHPSPLMGGFGMKHPPPQILIKNTPVPADPPTAFNKDKLNSFITQYSTGQVSVEIEWELQKENSKRWNPEIQYTSNLYKSNNVEFAVNTEGVYSEPRPIGTRYLTRNL

SEQ ID NO: 691 - protein, 736 aa, synthetic construct
MAADGYLPDWLEDTLSEGIRQWWKLKPGPPPPKPAERHKDDSRGLVLPGYKYLGPGNGLDKGEPVNAADAAALEHDKAYDQQLKAGDNPYLKYNHADAEFQERLKEDTSFGGNLGRAVFQAKKRLLEPLGLVEEAAKTAPGKKRPVEQSPQEPDSSAGIGKSGSQPAKKKLNFGQTGDTESVPDPQPIGEPPAAPSGVGSLTMASGGGAPVADNNEGADGVGSSSGNWHCDSQWLGDRVITTSTRTWALPTYNNHLYKQISNSTSGGSSNDNAYFGYSTPWGYFDFNRFHCHFSPRDWQRLINNNWGFRPKRLNFKLFNIQVKEVTDNNGVKTIANNLTSTVQVFGDSDYQLPYVLGSAHEGCLPPFPADVFMIPQYGYLTLNDGSQAVGRSSFYCLEYFPSQMLRTGNNFQFSYEFENVPFHSSYAHSQSLDRLMNPLIDQYLYYLSKTINGSGQNQQTLKFSVAGPSNMAVQGRNYIPGPSYRQQRVSTTVTQNNNSEFAWPRASSWALNGRNSLMNPGPAMASHKEGEDRFFPLSGSLIFGKQGTGRDNVDADKVMITNEEEIKTTNPVATESYGQVATNHQSAQAQAQTGWVQNQGILPGMVWQDRDVYLQGPIWAKIPHTDGNFHPSPLMGGFGMKHPPPQILIKNTPVPADPPTAFNKDKLNSFITQYSTGQVSVEIEWELQKENSKRWNPEIQYTSNLYKSNNVEFAVNTEGVYSEPRPIGTRYLTRNL

SEQ ID NO: 692 - protein, 736 aa, synthetic construct
MAADGYLPDWLEDTLSEGIRQWWKLKPGPPPPKPAERHKDDSRGLVLPGYKYLGPGNGLDKGEPVNAADAAALEHDKAYDQQLKAGDNPYLKYNHADAEFQERLKEDTSFGGNLGRAVFQAKKRLLEPLGLVEEAAKTAPGKKRPVEQSPQEPDSSAGIGKSGSQPAKKKLNFGQTGDTESVPDPQPIGEPPAAPSGVGSLTMASGGGAPVADNNEGADGVGSSSGNWHCDSQWLGDRVITTSTRTWALPTYNNHLYKQISNSTSGGSSNDNAYFGYSTPWGYFDFNRFHCHFSPRDWQRLINNNWGFRPKRLNFKLFNIQVKEVTDNNGVKTIANNLTSTVQVFGDSDYQLPYVLGSAHEGCLPPFPADVFMIPQYGYLTLNDGSQAVGRSSFYCLEYFPSQMLRTGNNFQFSYEFENVPFHSSYAHSQSLDRLMNPLIDQYLYYLSKTINGSGQNQQTLKFSVAGPSNMAVQGRNYIPGPSYRQQRVSTTVTQNNNSEFAWPGASSWALNGRNSLMNPGPAMASHKEGEDRFFPLSGSLIFGKQGTGRDNVDADKVMITNEEEIKTTNPVATESYGQVATNHQSAQAQAQTGWVQNQGILPGMVWQDRDVYLQGPIWAKIPHTDGNFHPSPLMGGFGMKHPPPQILIKNTPVPADPPTAFNKDKLNSFITQYSTGQVSVEIEWELQKENSKRWNPEIQYTSNLCKSNNVEFAVNTEGVYSEPRPIGTRYLTRNL

SEQ ID NO: 693 - protein, 736 aa, synthetic construct
MAADGYLPDWLEDTLSEGIRQWWKLKPGPPPPKPAERHKDDSRGLVLPGYKYLGPGNGLDKGEPVNAADAAALEHDKAYDQQLKAGDNPYLKYNHADAEFQERLKEDTSFGGNLGRAVFQAKKRLLEPLGLVEEAAKTAPGKKRPVEQSPQEPDSSAGIGKSGSQPAKKKLNFGQTGDTESVPDPQPIGEPPAAPSGVGSLTMASGGGAPVADNNEGADGVGSSSGNWHCDSQWLGDRVITTSTRTWALPTYNNHLYKQISNSTSGGSSNDNAYFGYSTPWGYFDFNRFHCHFSPRDWQRLINNNWGFRPKRLNFKLFNIQVKEVTDNNGVKTIANNLTSTVQVFGDSDYQLPYVLGSAHEGCLPPFPADVFMIPQYGYLTLNDGSQAVGRSSFYCLEYFPSQMLRTGNNFQFSYEFENVPFHSSYAHSQSLDRLMNPLIDQYLYYLSKTINGSGQNQQTLKFSVAGPSNMAVQGRNYIPGPSYRQQRVSTTVTQNNNSEIAWPRASSWALNGRNSLMNPGPAMASHKEGEDRFFPLSGSLIFGKQGTGRDNVDADKVMITNEEEIKTTNPVATESYGQVATNHQSAQAQAQTGWVQNQGILPGMVWQDRDVYLQGPIWAKIPHTDGNFHPSPLMGGFGMKHPPPQILIKNTPVPADPPTAFNKDKLNSFITQYSTGQVSVEIEWELQKENSKRWNPEIQYTSNLYKSNNVEFAVNTEGVYSEPRPIGTRYLTRNL

SEQ ID NO: 694 - protein, 736 aa, synthetic construct
MAADGYLPDWLEDTLSEGIRQWWKLKPGPPPPKPAERHKDDSRGLVLPGYKYLGPGNGLDKGEPVNAADAAALEHDKAYDQQLKAGDNPYLKYNHADAEFQERLKEDTSFGGNLGRAVFQAKKRLLEPLGLVEEAAKTAPGKKRPVEQSPQEPDSSAGIGKSGSQPAKKKLNFGQTGDTESVPDPQPIGEPPAAPSGVGSLTMASGGGAPVADNNEGADGVGSSSGNWHCDSQWLGDRVITTSTRTWALPTYNNHLYKQISNSTSGGSSNDNAYFGYSTPWGYFDFNRFHCHFSPRDWQRLINNNWGFRPKRLNFKLFNIQVKEVTDNNGVKTIANNLTSTVQVFGDSDYQLPYVLGSAHEGCLPPFPADVFMIPQYGYLTLNDGSQAVGRSSFYCLEYFPSQMLRTGNNFQFSYEFENVPFHSSYAHSQSLDRLMNPLIDQYLYYLSKTINGSGQNQQTLKFSVAGPSNMAVQGRNYIPGPSYRQQRVSTTVTQNNNSEIAWPGASSWALNGRNSLMNPGPAMASHKEGEDRFFPLSGSLIFGKQGTGRDNVDADKVMITNEEEIKTTNPVATESYGQVATNHQSAQAQAQTGWVQNQGILPGMVWQDRDVYLQGPIWAKIPHTDGNFHPSPLMGGFGMKHPPPQILIKNTPVPADPPTAFNKDKLNSFITQYSTGQVSVEIEWELQKENSKRWNPEIQYTSNLCKSNNVEFAVNTEGVYSEPRPIGTRYLTRNL

SEQ ID NO: 695 - protein, 736 aa, synthetic construct
MAADGYLPDWLEDTLSEGIRQWWKLKPGPPPPKPAERHKDDSRGLVLPGYKYLGPGNGLDKGEPVNAADAAALEHDKAYDQQLKAGDNPYLKYNHADAEFQERLKEDTSFGGNLGRAVFQAKKRLLEPLGLVEEAAKTAPGKKRPVEQSPQEPDSSAGIGKSGSQPAKKKLNFGQTGDTESVPDPQPIGEPPAAPSGVGSLTMASGGGAPVADNNEGADGVGSSSGNWHCDSQWLGDRVITTSTRTWALPTYNNHLYKQISNSTSGGSSNDNAYFGYSTPWGYFDFNRFHCHFSPRDWQRLINNNWGFRPKRLNFKLFNIQVKEVTDNNGVKTIANNLTSTVQVFGDSDYQLPYVLGSAHEGCLPPFPADVFMIPQYGYLTLNDGSQAVGRSSFYCLEYFPSQMLRTGNNFQFSYEFENVPFHSSYAHSQSLDRLMNPLIDQYLYYLSKTINGSGQNQQTLKFSVAGPSNMAVQGRNYIPGPSYRQQRVSTTVTQNNNSEFAWPRASSWALNGRNSLMNPGPAMASHKEGEDRFFPLSGSLIFGKQGTGRDNVDADKVMITNEEEIKTTNPVATESYGQVATNHQSAQAQAQTGWVQNQGILPGMVWQDRDVYLQGPIWAKIPHTDGNFHPSPLMGGFGMKHPPPQILIKNTPVPADPPTAFNKDKLNSFITQYSTGQVSVEIEWELQKENSKRWNPEIQYTSNLCKSNNVEFAVNTEGVYSEPRPIGTRYLTRNL

SEQ ID NO: 696 - protein, 736 aa, synthetic construct
MAADGYLPDWLEDTLSEGIRQWWKLKPGPPPPKPAERHKDDSRGLVLPGYKYLGPGNGLDKGEPVNAADAAALEHDKAYDQQLKAGDNPYLKYNHADAEFQERLKEDTSFGGNLGRAVFQAKKRLLEPLGLVEEAAKTAPGKKRPVEQSPQEPDSSAGIGKSGSQPAKKKLNFGQTGDTESVPDPQPIGEPPAAPSGVGSLTMASGGGAPVADNNEGADGVGSSSGNWHCDSQWLGDRVITTSTRTWALPTYNNHLYKQISNSTSGGSSNDNAYFGYSTPWGYFDFNRFHCHFSPRDWQRLINNNWGFRPKRLNFKLFNIQVKEVTDNNGVKTIANNLTSTVQVFGDSDYQLPYVLGSAHEGCLPPFPADVFMIPQYGYLTLNDGSQAVGRSSFYCLEYFPSQMLRTGNNFQFSYEFENVPFHSSYAHSQSLDRLMNPLIDQYLYYLSKTINGSGQNQQTLKFSVAGPSNMAVQGRNYIPGPSYRQQRVSTTVTQNNNSEIAWPRASSWALNGRNSLMNPGPAMASHKEGEDRFFPLSGSLIFGKQGTGRDNVDADKVMITNEEEIKTTNPVATESYGQVATNHQSAQAQAQTGWVQNQGILPGMVWQDRDVYLQGPIWAKIPHTDGNFHPSPLMGGFGMKHPPPQILIKNTPVPADPPTAFNKDKLNSFITQYSTGQVSVEIEWELQKENSKRWNPEIQYTSNLCKSNNVEFAVNTEGVYSEPRPIGTRYLTRNL

SEQ ID NO: 697 - protein, 736 aa, synthetic construct
MAADGYLPDWLEDTLSEGIRQWWKLKPGPPPPKPAERHKDDSRGLVLPGYKYLGPGNGLDKGEPVNAADAAALEHDKAYDQQLKAGDNPYLKYNHADAEFQERLKEDTSFGGNLGRAVFQAKKRLLEPLGLVEEAAKTAPGKKRPVEQSPQEPDSSAGIGKSGSQPAKKKLNFGQTGDTESVPDPQPIGEPPAAPSGVGSLTMASGGGAPVADNNEGADGVGSSSGNWHCDSQWLGDRVITTSTRTWALPTYNNHLYKQISNSTSGGSSNDNAYFGYSTPWGYFDFNRFHCHFSPRDWQRLINNNWGFRPKRLNFKLFNIQVKEVTDNNGVKTIANNLTSTVQVFADSDYQLPYVLGSAHEGCLPPFPADVFMIPQYGYLTLNDGSQAVGRSSFYCLEYFPSQMLRTGNNFQFSYEFENVPFHSSYAHSQSLDRLMNPLIDQYLYYLSKTINGSGQNQQTLKFSVAGPSNMAVQGRNYIPGPSYRQQRVSTTVTQNNNSEFAWPGASSWALNGRNSLMNPGPAMASHKEGEDRFFPLSGSLIFGKQGTGRDNVDADKVMITNEEEIKTTNPVATESYGQVATNHQSAQAQAQTGWVQNQGILPGMVWQDRDVYLQGPIWAKIPHTDGNFHPSPLMGGFGMKHPPPQILIKNTPVPADPPTAFNKDKLNSFITQYSTGQVSVEIEWELQKENSKRWNPEIQYTSNLYKSNNVEFAVNTEGVYSEPRPIGTRYLTRNL

SEQ ID NO: 698 - protein, 736 aa, synthetic construct
MAADGYLPDWLEDTLSEGIRQWWKLKPGPPPPKPAERHKDDSRGLVLPGYKYLGPGNGLDKGEPVNAADAAALEHDKAYDQQLKAGDNPYLKYNHADAEFQERLKEDTSFGGNLGRAVFQAKKRLLEPLGLVEEAAKTAPGKKRPVEQSPQEPDSSAGIGKSGSQPAKKKLNFGQTGDTESVPDPQPIGEPPAAPSGVGSLTMASGGGAPVADNNEGADGVGSSSGNWHCDSQWLGDRVITTSTRTWALPTYNNHLYKQISNSTSGGSSNDNAYFGYSTPWGYFDFNRFHCHFSPRDWQRLINNNWGFRPKRLNFKLFNIQVKEVTDNNGVKTIANNLTSTVQVFADSDYQLPYVLGSAHEGCLPPFPADVFMIPQYGYLTLNDGSQAVGRSSFYCLEYFPSQMLRTGNNFQFSYEFENVPFHSSYAHSQSLDRLMNPLIDQYLYYLSKTINGSGQNQQTLKFSVAGPSNMAVQGRNYIPGPSYRQQRVSTTVTQNNNSEIAWPGASSWALNGRNSLMNPGPAMASHKEGEDRFFPLSGSLIFGKQGTGRDNVDADKVMITNEEEIKTTNPVATESYGQVATNHQSAQAQAQTGWVQNQGILPGMVWQDRDVYLQGPIWAKIPHTDGNFHPSPLMGGFGMKHPPPQILIKNTPVPADPPTAFNKDKLNSFITQYSTGQVSVEIEWELQKENSKRWNPEIQYTSNLYKSNNVEFAVNTEGVYSEPRPIGTRYLTRNL

SEQ ID NO: 699 - protein, 736 aa, synthetic construct
MAADGYLPDWLEDTLSEGIRQWWKLKPGPPPPKPAERHKDDSRGLVLPGYKYLGPGNGLDKGEPVNAADAAALEHDKAYDQQLKAGDNPYLKYNHADAEFQERLKEDTSFGGNLGRAVFQAKKRLLEPLGLVEEAAKTAPGKKRPVEQSPQEPDSSAGIGKSGSQPAKKKLNFGQTGDTESVPDPQPIGEPPAAPSGVGSLTMASGGGAPVADNNEGADGVGSSSGNWHCDSQWLGDRVITTSTRTWALPTYNNHLYKQISNSTSGGSSNDNAYFGYSTPWGYFDFNRFHCHFSPRDWQRLINNNWGFRPKRLNFKLFNIQVKEVTDNNGVKTIANNLTSTVQVFADSDYQLPYVLGSAHEGCLPPFPADVFMIPQYGYLTLNDGSQAVGRSSFYCLEYFPSQMLRTGNNFQFSYEFENVPFHSSYAHSQSLDRLMNPLIDQYLYYLSKTINGSGQNQQTLKFSVAGPSNMAVQGRNYIPGPSYRQQRVSTTVTQNNNSEFAWPRASSWALNGRNSLMNPGPAMASHKEGEDRFFPLSGSLIFGKQGTGRDNVDADKVMITNEEEIKTTNPVATESYGQVATNHQSAQAQAQTGWVQNQGILPGMVWQDRDVYLQGPIWAKIPHTDGNFHPSPLMGGFGMKHPPPQILIKNTPVPADPPTAFNKDKLNSFITQYSTGQVSVEIEWELQKENSKRWNPEIQYTSNLYKSNNVEFAVNTEGVYSEPRPIGTRYLTRNL

SEQ ID NO: 700 - protein, 736 aa, synthetic construct
MAADGYLPDWLEDTLSEGIRQWWKLKPGPPPPKPAERHKDDSRGLVLPGYKYLGPGNGLDKGEPVNAADAAALEHDKAYDQQLKAGDNPYLKYNHADAEFQERLKEDTSFGGNLGRAVFQAKKRLLEPLGLVEEAAKTAPGKKRPVEQSPQEPDSSAGIGKSGSQPAKKKLNFGQTGDTESVPDPQPIGEPPAAPSGVGSLTMASGGGAPVADNNEGADGVGSSSGNWHCDSQWLGDRVITTSTRTWALPTYNNHLYKQISNSTSGGSSNDNAYFGYSTPWGYFDFNRFHCHFSPRDWQRLINNNWGFRPKRLNFKLFNIQVKEVTDNNGVKTIANNLTSTVQVFADSDYQLPYVLGSAHEGCLPPFPADVFMIPQYGYLTLNDGSQAVGRSSFYCLEYFPSQMLRTGNNFQFSYEFENVPFHSSYAHSQSLDRLMNPLIDQYLYYLSKTINGSGQNQQTLKFSVAGPSNMAVQGRNYIPGPSYRQQRVSTTVTQNNNSEFAWPGASSWALNGRNSLMNPGPAMASHKEGEDRFFPLSGSLIFGKQGTGRDNVDADKVMITNEEEIKTTNPVATESYGQVATNHQSAQAQAQTGWVQNQGILPGMVWQDRDVYLQGPIWAKIPHTDGNFHPSPLMGGFGMKHPPPQILIKNTPVPADPPTAFNKDKLNSFITQYSTGQVSVEIEWELQKENSKRWNPEIQYTSNLCKSNNVEFAVNTEGVYSEPRPIGTRYLTRNL

SEQ ID NO: 701 - protein, 736 aa, synthetic construct
MAADGYLPDWLEDTLSEGIRQWWKLKPGPPPPKPAERHKDDSRGLVLPGYKYLGPGNGLDKGEPVNAADAAALEHDKAYDQQLKAGDNPYLKYNHADAEFQERLKEDTSFGGNLGRAVFQAKKRLLEPLGLVEEAAKTAPGKKRPVEQSPQEPDSSAGIGKSGSQPAKKKLNFGQTGDTESVPDPQPIGEPPAAPSGVGSLTMASGGGAPVADNNEGADGVGSSSGNWHCDSQWLGDRVITTSTRTWALPTYNNHLYKQISNSTSGGSSNDNAYFGYSTPWGYFDFNRFHCHFSPRDWQRLINNNWGFRPKRLNFKLFNIQVKEVTDNNGVKTIANNLTSTVQVFADSDYQLPYVLGSAHEGCLPPFPADVFMIPQYGYLTLNDGSQAVGRSSFYCLEYFPSQMLRTGNNFQFSYEFENVPFHSSYAHSQSLDRLMNPLIDQYLYYLSKTINGSGQNQQTLKFSVAGPSNMAVQGRNYIPGPSYRQQRVSTTVTQNNNSEIAWPRASSWALNGRNSLMNPGPAMASHKEGEDRFFPLSGSLIFGKQGTGRDNVDADKVMITNEEEIKTTNPVATESYGQVATNHQSAQAQAQTGWVQNQGILPGMVWQDRDVYLQGPIWAKIPHTDGNFHPSPLMGGFGMKHPPPQILIKNTPVPADPPTAFNKDKLNSFITQYSTGQVSVEIEWELQKENSKRWNPEIQYTSNLYKSNNVEFAVNTEGVYSEPRPIGTRYLTRNL

SEQ ID NO: 702 - protein, 736 aa, synthetic construct
MAADGYLPDWLEDTLSEGIRQWWKLKPGPPPPKPAERHKDDSRGLVLPGYKYLGPGNGLDKGEPVNAADAAALEHDKAYDQQLKAGDNPYLKYNHADAEFQERLKEDTSFGGNLGRAVFQAKKRLLEPLGLVEEAAKTAPGKKRPVEQSPQEPDSSAGIGKSGSQPAKKKLNFGQTGDTESVPDPQPIGEPPAAPSGVGSLTMASGGGAPVADNNEGADGVGSSSGNWHCDSQWLGDRVITTSTRTWALPTYNNHLYKQISNSTSGGSSNDNAYFGYSTPWGYFDFNRFHCHFSPRDWQRLINNNWGFRPKRLNFKLFNIQVKEVTDNNGVKTIANNLTSTVQVFADSDYQLPYVLGSAHEGCLPPFPADVFMIPQYGYLTLNDGSQAVGRSSFYCLEYFPSQMLRTGNNFQFSYEFENVPFHSSYAHSQSLDRLMNPLIDQYLYYLSKTINGSGQNQQTLKFSVAGPSNMAVQGRNYIPGPSYRQQRVSTTVTQNNNSEIAWPGASSWALNGRNSLMNPGPAMASHKEGEDRFFPLSGSLIFGKQGTGRDNVDADKVMITNEEEIKTTNPVATESYGQVATNHQSAQAQAQTGWVQNQGILPGMVWQDRDVYLQGPIWAKIPHTDGNFHPSPLMGGFGMKHPPPQILIKNTPVPADPPTAFNKDKLNSFITQYSTGQVSVEIEWELQKENSKRWNPEIQYTSNLCKSNNVEFAVNTEGVYSEPRPIGTRYLTRNL

SEQ ID NO: 703 - protein, 736 aa, synthetic construct
MAADGYLPDWLEDTLSEGIRQWWKLKPGPPPPKPAERHKDDSRGLVLPGYKYLGPGNGLDKGEPVNAADAAALEHDKAYDQQLKAGDNPYLKYNHADAEFQERLKEDTSFGGNLGRAVFQAKKRLLEPLGLVEEAAKTAPGKKRPVEQSPQEPDSSAGIGKSGSQPAKKKLNFGQTGDTESVPDPQPIGEPPAAPSGVGSLTMASGGGAPVADNNEGADGVGSSSGNWHCDSQWLGDRVITTSTRTWALPTYNNHLYKQISNSTSGGSSNDNAYFGYSTPWGYFDFNRFHCHFSPRDWQRLINNNWGFRPKRLNFKLFNIQVKEVTDNNGVKTIANNLTSTVQVFADSDYQLPYVLGSAHEGCLPPFPADVFMIPQYGYLTLNDGSQAVGRSSFYCLEYFPSQMLRTGNNFQFSYEFENVPFHSSYAHSQSLDRLMNPLIDQYLYYLSKTINGSGQNQQTLKFSVAGPSNMAVQGRNYIPGPSYRQQRVSTTVTQNNNSEFAWPRASSWALNGRNSLMNPGPAMASHKEGEDRFFPLSGSLIFGKQGTGRDNVDADKVMITNEEEIKTTNPVATESYGQVATNHQSAQAQAQTGWVQNQGILPGMVWQDRDVYLQGPIWAKIPHTDGNFHPSPLMGGFGMKHPPPQILIKNTPVPADPPTAFNKDKLNSFITQYSTGQVSVEIEWELQKENSKRWNPEIQYTSNLCKSNNVEFAVNTEGVYSEPRPIGTRYLTRNL

SEQ ID NO: 704 - protein, 736 aa, synthetic construct
MAADGYLPDWLEDTLSEGIRQWWKLKPGPPPPKPAERHKDDSRGLVLPGYKYLGPGNGLDKGEPVNAADAAALEHDKAYDQQLKAGDNPYLKYNHADAEFQERLKEDTSFGGNLGRAVFQAKKRLLEPLGLVEEAAKTAPGKKRPVEQSPQEPDSSAGIGKSGSQPAKKKLNFGQTGDTESVPDPQPIGEPPAAPSGVGSLTMASGGGAPVADNNEGADGVGSSSGNWHCDSQWLGDRVITTSTRTWALPTYNNHLYKQISNSTSGGSSNDNAYFGYSTPWGYFDFNRFHCHFSPRDWQRLINNNWGFRPKRLNFKLFNIQVKEVTDNNGVKTIANNLTSTVQVFADSDYQLPYVLGSAHEGCLPPFPADVFMIPQYGYLTLNDGSQAVGRSSFYCLEYFPSQMLRTGNNFQFSYEFENVPFHSSYAHSQSLDRLMNPLIDQYLYYLSKTINGSGQNQQTLKFSVAGPSNMAVQGRNYIPGPSYRQQRVSTTVTQNNNSEIAWPRASSWALNGRNSLMNPGPAMASHKEGEDRFFPLSGSLIFGKQGTGRDNVDADKVMITNEEEIKTTNPVATESYGQVATNHQSAQAQAQTGWVQNQGILPGMVWQDRDVYLQGPIWAKIPHTDGNFHPSPLMGGFGMKHPPPQILIKNTPVPADPPTAFNKDKLNSFITQYSTGQVSVEIEWELQKENSKRWNPEIQYTSNLCKSNNVEFAVNTEGVYSEPRPIGTRYLTRNL

SEQ ID NO: 705 - protein, 738 aa, synthetic construct
MAADGYLPDWLEDNLSEGIREWWDLKPGAPKPKANQQKQDDGRGLVLPGYKYLGPFNGLDKGEPVNAADAAALEHDKAYDQQLKAGDNPYLRYNHADAEFQERLQEDTSFGGNLGRAVFQAKKRVLEPLGLVEEAAKTAPGKKRPVEPSPQRSPDSSTGIGKKGQQPAKKRLNFGQTGDSESVPDPQPIGEPPAGPSGLGSGTMAAGGGAPMADNNEGADGVGSSSGNWHCDSTWLGDRVITTSTRTWALPTYNNHLYKQISNGTSGGSTNDNTYFGYSTPWGYFDFNRFHCHFSPRDWQRLINNNWGFRPKRLSFKLFNIQVKEVTQNEGTKTIANNLTSTIQVFGDSEYQLPYVLGSAHQGCLPPFPADVFMIPQYGYLTLNNGSQAVGRSSFYCLEYFPSQMLRTGNNFEFSYTFEDVPFHSSYAHSQSLDRLMNPLIDQYLYYLSRTQSTGGTQGTQQLLFSQAGPANMSAQAKNWLPGPCYRQQRVSTTLSQNNNSNFAWTGATKYHLNGRDSLVNPGVAMATHKDDEERFFPSSGVLMFGKQGAGRDNVDYSSVMLTSEEEIKTTNPVATEQYGVVADNLQQTNTGPIVGNVNSQGALPGMVWQNRDVYLQGPIWAKIPHTDGNFHPSPLMGGFGLKHPPPQILIKNTPVPADPPTTFSQAKLASFITQYSTGQVSVEIEWELQKENSKRWNPEIQYTSNYYKSTNVDFAVNTEGTYSEPRPIGTRYLTRNL

SEQ ID NO: 706 - protein, 738 aa, synthetic construct
MAADGYLPDWLEDNLSEGIREWWDLKPGAPKPKANQQKQDDGRGLVLPGYKYLGPFNGLDKGEPVNAADAAALEHDKAYDQQLKAGDNPYLRYNHADAEFQERLQEDTSFGGNLGRAVFQAKKRVLEPLGLVEEAAKTAPGKKRPVEPSPQRSPDSSTGIGKKGQQPAKKRLNFGQTGDSESVPDPQPIGEPPAGPSGLGSGTMAAGGGAPMADNNEGADGVGSSSGNWHCDSTWLGDRVITTSTRTWALPTYNNHLYKQISNGTSGGSTNDNTYFGYSTPWGYFDFNRFHCHFSPRDWQRLINNNWGFRPKRLSFKLFNIQVKEVTQNEGTKTIANNLTSTIQVFGDSEYQLPYVLGSAHQGCLPPFPADVFMIPQYGYLTLNNGSQAVGRSSFYCLEYFPSQMLRTGNNFEFSYTFEDVPFHSSYAHSQSLDRLMNPLIDQYLYYLSRTQSTGGTQGTQQLLFSQAGPANMSAQAKNWLPGPCYRQQRVSTTLSQNNNSNIAWTGATKYHLNGRDSLVNPGVAMATHKDDEERFFPSSGVLMFGKQGAGRDNVDYSSVMLTSEEEIKTTNPVATEQYGVVADNLQQTNTGPIVGNVNSQGALPGMVWQNRDVYLQGPIWAKIPHTDGNFHPSPLMGGFGLKHPPPQILIKNTPVPADPPTTFSQAKLASFITQYSTGQVSVEIEWELQKENSKRWNPEIQYTSNYYKSTNVDFAVNTEGTYSEPRPIGTRYLTRNL

SEQ ID NO: 707 - protein, 738 aa, synthetic construct
MAADGYLPDWLEDNLSEGIREWWDLKPGAPKPKANQQKQDDGRGLVLPGYKYLGPFNGLDKGEPVNAADAAALEHDKAYDQQLKAGDNPYLRYNHADAEFQERLQEDTSFGGNLGRAVFQAKKRVLEPLGLVEEAAKTAPGKKRPVEPSPQRSPDSSTGIGKKGQQPAKKRLNFGQTGDSESVPDPQPIGEPPAGPSGLGSGTMAAGGGAPMADNNEGADGVGSSSGNWHCDSTWLGDRVITTSTRTWALPTYNNHLYKQISNGTSGGSTNDNTYFGYSTPWGYFDFNRFHCHFSPRDWQRLINNNWGFRPKRLSFKLFNIQVKEVTQNEGTKTIANNLTSTIQVFGDSEYQLPYVLGSAHQGCLPPFPADVFMIPQYGYLTLNNGSQAVGRSSFYCLEYFPSQMLRTGNNFEFSYTFEDVPFHSSYAHSQSLDRLMNPLIDQYLYYLSRTQSTGGTQGTQQLLFSQAGPANMSAQAKNWLPGPCYRQQRVSTTLSQNNNSNFAWTRATKYHLNGRDSLVNPGVAMATHKDDEERFFPSSGVLMFGKQGAGRDNVDYSSVMLTSEEEIKTTNPVATEQYGVVADNLQQTNTGPIVGNVNSQGALPGMVWQNRDVYLQGPIWAKIPHTDGNFHPSPLMGGFGLKHPPPQILIKNTPVPADPPTTFSQAKLASFITQYSTGQVSVEIEWELQKENSKRWNPEIQYTSNYYKSTNVDFAVNTEGTYSEPRPIGTRYLTRNL

SEQ ID NO: 708 - protein, 738 aa, synthetic construct
MAADGYLPDWLEDNLSEGIREWWDLKPGAPKPKANQQKQDDGRGLVLPGYKYLGPFNGLDKGEPVNAADAAALEHDKAYDQQLKAGDNPYLRYNHADAEFQERLQEDTSFGGNLGRAVFQAKKRVLEPLGLVEEAAKTAPGKKRPVEPSPQRSPDSSTGIGKKGQQPAKKRLNFGQTGDSESVPDPQPIGEPPAGPSGLGSGTMAAGGGAPMADNNEGADGVGSSSGNWHCDSTWLGDRVITTSTRTWALPTYNNHLYKQISNGTSGGSTNDNTYFGYSTPWGYFDFNRFHCHFSPRDWQRLINNNWGFRPKRLSFKLFNIQVKEVTQNEGTKTIANNLTSTIQVFGDSEYQLPYVLGSAHQGCLPPFPADVFMIPQYGYLTLNNGSQAVGRSSFYCLEYFPSQMLRTGNNFEFSYTFEDVPFHSSYAHSQSLDRLMNPLIDQYLYYLSRTQSTGGTQGTQQLLFSQAGPANMSAQAKNWLPGPCYRQQRVSTTLSQNNNSNFAWTGATKYHLNGRDSLVNPGVAMATHKDDEERFFPSSGVLMFGKQGAGRDNVDYSSVMLTSEEEIKTTNPVATEQYGVVADNLQQTNTGPIVGNVNSQGALPGMVWQNRDVYLQGPIWAKIPHTDGNFHPSPLMGGFGLKHPPPQILIKNTPVPADPPTTFSQAKLASFITQYSTGQVSVEIEWELQKENSKRWNPEIQYTSNYCKSTNVDFAVNTEGTYSEPRPIGTRYLTRNL

SEQ ID NO: 709 - protein, 738 aa, synthetic construct
MAADGYLPDWLEDNLSEGIREWWDLKPGAPKPKANQQKQDDGRGLVLPGYKYLGPFNGLDKGEPVNAADAAALEHDKAYDQQLKAGDNPYLRYNHADAEFQERLQEDTSFGGNLGRAVFQAKKRVLEPLGLVEEAAKTAPGKKRPVEPSPQRSPDSSTGIGKKGQQPAKKRLNFGQTGDSESVPDPQPIGEPPAGPSGLGSGTMAAGGGAPMADNNEGADGVGSSSGNWHCDSTWLGDRVITTSTRTWALPTYNNHLYKQISNGTSGGSTNDNTYFGYSTPWGYFDFNRFHCHFSPRDWQRLINNNWGFRPKRLSFKLFNIQVKEVTQNEGTKTIANNLTSTIQVFGDSEYQLPYVLGSAHQGCLPPFPADVFMIPQYGYLTLNNGSQAVGRSSFYCLEYFPSQMLRTGNNFEFSYTFEDVPFHSSYAHSQSLDRLMNPLIDQYLYYLSRTQSTGGTQGTQQLLFSQAGPANMSAQAKNWLPGPCYRQQRVSTTLSQNNNSNIAWTRATKYHLNGRDSLVNPGVAMATHKDDEERFFPSSGVLMFGKQGAGRDNVDYSSVMLTSEEEIKTTNPVATEQYGVVADNLQQTNTGPIVGNVNSQGALPGMVWQNRDVYLQGPIWAKIPHTDGNFHPSPLMGGFGLKHPPPQILIKNTPVPADPPTTFSQAKLASFITQYSTGQVSVEIEWELQKENSKRWNPEIQYTSNYYKSTNVDFAVNTEGTYSEPRPIGTRYLTRNL

SEQ ID NO: 710 - protein, 738 aa, synthetic construct
MAADGYLPDWLEDNLSEGIREWWDLKPGAPKPKANQQKQDDGRGLVLPGYKYLGPFNGLDKGEPVNAADAAALEHDKAYDQQLKAGDNPYLRYNHADAEFQERLQEDTSFGGNLGRAVFQAKKRVLEPLGLVEEAAKTAPGKKRPVEPSPQRSPDSSTGIGKKGQQPAKKRLNFGQTGDSESVPDPQPIGEPPAGPSGLGSGTMAAGGGAPMADNNEGADGVGSSSGNWHCDSTWLGDRVITTSTRTWALPTYNNHLYKQISNGTSGGSTNDNTYFGYSTPWGYFDFNRFHCHFSPRDWQRLINNNWGFRPKRLSFKLFNIQVKEVTQNEGTKTIANNLTSTIQVFGDSEYQLPYVLGSAHQGCLPPFPADVFMIPQYGYLTLNNGSQAVGRSSFYCLEYFPSQMLRTGNNFEFSYTFEDVPFHSSYAHSQSLDRLMNPLIDQYLYYLSRTQSTGGTQGTQQLLFSQAGPANMSAQAKNWLPGPCYRQQRVSTTLSQNNNSNIAWTGATKYHLNGRDSLVNPGVAMATHKDDEERFFPSSGVLMFGKQGAGRDNVDYSSVMLTSEEEIKTTNPVATEQYGVVADNLQQTNTGPIVGNVNSQGALPGMVWQNRDVYLQGPIWAKIPHTDGNFHPSPLMGGFGLKHPPPQILIKNTPVPADPPTTFSQAKLASFITQYSTGQVSVEIEWELQKENSKRWNPEIQYTSNYCKSTNVDFAVNTEGTYSEPRPIGTRYLTRNL

SEQ ID NO: 711 - protein, 738 aa, synthetic construct
MAADGYLPDWLEDNLSEGIREWWDLKPGAPKPKANQQKQDDGRGLVLPGYKYLGPFNGLDKGEPVNAADAAALEHDKAYDQQLKAGDNPYLRYNHADAEFQERLQEDTSFGGNLGRAVFQAKKRVLEPLGLVEEAAKTAPGKKRPVEPSPQRSPDSSTGIGKKGQQPAKKRLNFGQTGDSESVPDPQPIGEPPAGPSGLGSGTMAAGGGAPMADNNEGADGVGSSSGNWHCDSTWLGDRVITTSTRTWALPTYNNHLYKQISNGTSGGSTNDNTYFGYSTPWGYFDFNRFHCHFSPRDWQRLINNNWGFRPKRLSFKLFNIQVKEVTQNEGTKTIANNLTSTIQVFGDSEYQLPYVLGSAHQGCLPPFPADVFMIPQYGYLTLNNGSQAVGRSSFYCLEYFPSQMLRTGNNFEFSYTFEDVPFHSSYAHSQSLDRLMNPLIDQYLYYLSRTQSTGGTQGTQQLLFSQAGPANMSAQAKNWLPGPCYRQQRVSTTLSQNNNSNFAWTRATKYHLNGRDSLVNPGVAMATHKDDEERFFPSSGVLMFGKQGAGRDNVDYSSVMLTSEEEIKTTNPVATEQYGVVADNLQQTNTGPIVGNVNSQGALPGMVWQNRDVYLQGPIWAKIPHTDGNFHPSPLMGGFGLKHPPPQILIKNTPVPADPPTTFSQAKLASFITQYSTGQVSVEIEWELQKENSKRWNPEIQYTSNYCKSTNVDFAVNTEGTYSEPRPIGTRYLTRNL

SEQ ID NO: 712 - protein, 738 aa, synthetic construct
MAADGYLPDWLEDNLSEGIREWWDLKPGAPKPKANQQKQDDGRGLVLPGYKYLGPFNGLDKGEPVNAADAAALEHDKAYDQQLKAGDNPYLRYNHADAEFQERLQEDTSFGGNLGRAVFQAKKRVLEPLGLVEEAAKTAPGKKRPVEPSPQRSPDSSTGIGKKGQQPAKKRLNFGQTGDSESVPDPQPIGEPPAGPSGLGSGTMAAGGGAPMADNNEGADGVGSSSGNWHCDSTWLGDRVITTSTRTWALPTYNNHLYKQISNGTSGGSTNDNTYFGYSTPWGYFDFNRFHCHFSPRDWQRLINNNWGFRPKRLSFKLFNIQVKEVTQNEGTKTIANNLTSTIQVFGDSEYQLPYVLGSAHQGCLPPFPADVFMIPQYGYLTLNNGSQAVGRSSFYCLEYFPSQMLRTGNNFEFSYTFEDVPFHSSYAHSQSLDRLMNPLIDQYLYYLSRTQSTGGTQGTQQLLFSQAGPANMSAQAKNWLPGPCYRQQRVSTTLSQNNNSNIAWTRATKYHLNGRDSLVNPGVAMATHKDDEERFFPSSGVLMFGKQGAGRDNVDYSSVMLTSEEEIKTTNPVATEQYGVVADNLQQTNTGPIVGNVNSQGALPGMVWQNRDVYLQGPIWAKIPHTDGNFHPSPLMGGFGLKHPPPQILIKNTPVPADPPTTFSQAKLASFITQYSTGQVSVEIEWELQKENSKRWNPEIQYTSNYCKSTNVDFAVNTEGTYSEPRPIGTRYLTRNL

SEQ ID NO: 713 - protein, 738 aa, synthetic construct
MAADGYLPDWLEDNLSEGIREWWDLKPGAPKPKANQQKQDDGRGLVLPGYKYLGPFNGLDKGEPVNAADAAALEHDKAYDQQLKAGDNPYLRYNHADAEFQERLQEDTSFGGNLGRAVFQAKKRVLEPLGLVEEAAKTAPGKKRPVEPSPQRSPDSSTGIGKKGQQPAKKRLNFGQTGDSESVPDPQPIGEPPAGPSGLGSGTMAAGGGAPMADNNEGADGVGSSSGNWHCDSTWLGDRVITTSTRTWALPTYNNHLYKQISNGTSGGSTNDNTYFGYSTPWGYFDFNRFHCHFSPRDWQRLINNNWGFRPKRLSFKLFNIQVKEVTQNEGTKTIANNLTSTIQVFTDSEYQLPYVLGSAHQGCLPPFPADVFMIPQYGYLTLNNGSQAVGRSSFYCLEYFPSQMLRTGNNFEFSYTFEDVPFHSSYAHSQSLDRLMNPLIDQYLYYLSRTQSTGGTQGTQQLLFSQAGPANMSAQAKNWLPGPCYRQQRVSTTLSQNNNSNFAWTGATKYHLNGRDSLVNPGVAMATHKDDEERFFPSSGVLMFGKQGAGRDNVDYSSVMLTSEEEIKTTNPVATEQYGVVADNLQQTNTGPIVGNVNSQGALPGMVWQNRDVYLQGPIWAKIPHTDGNFHPSPLMGGFGLKHPPPQILIKNTPVPADPPTTFSQAKLASFITQYSTGQVSVEIEWELQKENSKRWNPEIQYTSNLYKSTNVDFAVNTEGTYSEPRPIGTRYLTRNL

SEQ ID NO: 714 - protein, 738 aa, synthetic construct
MAADGYLPDWLEDNLSEGIREWWDLKPGAPKPKANQQKQDDGRGLVLPGYKYLGPFNGLDKGEPVNAADAAALEHDKAYDQQLKAGDNPYLRYNHADAEFQERLQEDTSFGGNLGRAVFQAKKRVLEPLGLVEEAAKTAPGKKRPVEPSPQRSPDSSTGIGKKGQQPAKKRLNFGQTGDSESVPDPQPIGEPPAGPSGLGSGTMAAGGGAPMADNNEGADGVGSSSGNWHCDSTWLGDRVITTSTRTWALPTYNNHLYKQISNGTSGGSTNDNTYFGYSTPWGYFDFNRFHCHFSPRDWQRLINNNWGFRPKRLSFKLFNIQVKEVTQNEGTKTIANNLTSTIQVFTDSEYQLPYVLGSAHQGCLPPFPADVFMIPQYGYLTLNNGSQAVGRSSFYCLEYFPSQMLRTGNNFEFSYTFEDVPFHSSYAHSQSLDRLMNPLIDQYLYYLSRTQSTGGTQGTQQLLFSQAGPANMSAQAKNWLPGPCYRQQRVSTTLSQNNNSNIAWTGATKYHLNGRDSLVNPGVAMATHKDDEERFFPSSGVLMFGKQGAGRDNVDYSSVMLTSEEEIKTTNPVATEQYGVVADNLQQTNTGPIVGNVNSQGALPGMVWQNRDVYLQGPIWAKIPHTDGNFHPSPLMGGFGLKHPPPQILIKNTPVPADPPTTFSQAKLASFITQYSTGQVSVEIEWELQKENSKRWNPEIQYTSNLYKSTNVDFAVNTEGTYSEPRPIGTRYLTRNL

SEQ ID NO: 715 - protein, 738 aa, synthetic construct
MAADGYLPDWLEDNLSEGIREWWDLKPGAPKPKANQQKQDDGRGLVLPGYKYLGPFNGLDKGEPVNAADAAALEHDKAYDQQLKAGDNPYLRYNHADAEFQERLQEDTSFGGNLGRAVFQAKKRVLEPLGLVEEAAKTAPGKKRPVEPSPQRSPDSSTGIGKKGQQPAKKRLNFGQTGDSESVPDPQPIGEPPAGPSGLGSGTMAAGGGAPMADNNEGADGVGSSSGNWHCDSTWLGDRVITTSTRTWALPTYNNHLYKQISNGTSGGSTNDNTYFGYSTPWGYFDFNRFHCHFSPRDWQRLINNNWGFRPKRLSFKLFNIQVKEVTQNEGTKTIANNLTSTIQVFTDSEYQLPYVLGSAHQGCLPPFPADVFMIPQYGYLTLNNGSQAVGRSSFYCLEYFPSQMLRTGNNFEFSYTFEDVPFHSSYAHSQSLDRLMNPLIDQYLYYLSRTQSTGGTQGTQQLLFSQAGPANMSAQAKNWLPGPCYRQQRVSTTLSQNNNSNFAWTRATKYHLNGRDSLVNPGVAMATHKDDEERFFPSSGVLMFGKQGAGRDNVDYSSVMLTSEEEIKTTNPVATEQYGVVADNLQQTNTGPIVGNVNSQGALPGMVWQNRDVYLQGPIWAKIPHTDGNFHPSPLMGGFGLKHPPPQILIKNTPVPADPPTTFSQAKLASFITQYSTGQVSVEIEWELQKENSKRWNPEIQYTSNLYKSTNVDFAVNTEGTYSEPRPIGTRYLTRNL

SEQ ID NO: 716 - protein, 738 aa, synthetic construct
MAADGYLPDWLEDNLSEGIREWWDLKPGAPKPKANQQKQDDGRGLVLPGYKYLGPFNGLDKGEPVNAADAAALEHDKAYDQQLKAGDNPYLRYNHADAEFQERLQEDTSFGGNLGRAVFQAKKRVLEPLGLVEEAAKTAPGKKRPVEPSPQRSPDSSTGIGKKGQQPAKKRLNFGQTGDSESVPDPQPIGEPPAGPSGLGSGTMAAGGGAPMADNNEGADGVGSSSGNWHCDSTWLGDRVITTSTRTWALPTYNNHLYKQISNGTSGGSTNDNTYFGYSTPWGYFDFNRFHCHFSPRDWQRLINNNWGFRPKRLSFKLFNIQVKEVTQNEGTKTIANNLTSTIQVFTDSEYQLPYVLGSAHQGCLPPFPADVFMIPQYGYLTLNNGSQAVGRSSFYCLEYFPSQMLRTGNNFEFSYTFEDVPFHSSYAHSQSLDRLMNPLIDQYLYYLSRTQSTGGTQGTQQLLFSQAGPANMSAQAKNWLPGPCYRQQRVSTTLSQNNNSNFAWTGATKYHLNGRDSLVNPGVAMATHKDDEERFFPSSGVLMFGKQGAGRDNVDYSSVMLTSEEEIKTTNPVATEQYGVVADNLQQTNTGPIVGNVNSQGALPGMVWQNRDVYLQGPIWAKIPHTDGNFHPSPLMGGFGLKHPPPQILIKNTPVPADPPTTFSQAKLASFITQYSTGQVSVEIEWELQKENSKRWNPEIQYTSNLCKSTNVDFAVNTEGTYSEPRPIGTRYLTRNL

SEQ ID NO: 717 - protein, 738 aa, synthetic construct
MAADGYLPDWLEDNLSEGIREWWDLKPGAPKPKANQQKQDDGRGLVLPGYKYLGPFNGLDKGEPVNAADAAALEHDKAYDQQLKAGDNPYLRYNHADAEFQERLQEDTSFGGNLGRAVFQAKKRVLEPLGLVEEAAKTAPGKKRPVEPSPQRSPDSSTGIGKKGQQPAKKRLNFGQTGDSESVPDPQPIGEPPAGPSGLGSGTMAAGGGAPMADNNEGADGVGSSSGNWHCDSTWLGDRVITTSTRTWALPTYNNHLYKQISNGTSGGSTNDNTYFGYSTPWGYFDFNRFHCHFSPRDWQRLINNNWGFRPKRLSFKLFNIQVKEVTQNEGTKTIANNLTSTIQVFTDSEYQLPYVLGSAHQGCLPPFPADVFMIPQYGYLTLNNGSQAVGRSSFYCLEYFPSQMLRTGNNFEFSYTFEDVPFHSSYAHSQSLDRLMNPLIDQYLYYLSRTQSTGGTQGTQQLLFSQAGPANMSAQAKNWLPGPCYRQQRVSTTLSQNNNSNIAWTRATKYHLNGRDSLVNPGVAMATHKDDEERFFPSSGVLMFGKQGAGRDNVDYSSVMLTSEEEIKTTNPVATEQYGVVADNLQQTNTGPIVGNVNSQGALPGMVWQNRDVYLQGPIWAKIPHTDGNFHPSPLMGGFGLKHPPPQILIKNTPVPADPPTTFSQAKLASFITQYSTGQVSVEIEWELQKENSKRWNPEIQYTSNLYKSTNVDFAVNTEGTYSEPRPIGTRYLTRNL

SEQ ID NO: 718 - protein, 738 aa, synthetic construct
MAADGYLPDWLEDNLSEGIREWWDLKPGAPKPKANQQKQDDGRGLVLPGYKYLGPFNGLDKGEPVNAADAAALEHDKAYDQQLKAGDNPYLRYNHADAEFQERLQEDTSFGGNLGRAVFQAKKRVLEPLGLVEEAAKTAPGKKRPVEPSPQRSPDSSTGIGKKGQQPAKKRLNFGQTGDSESVPDPQPIGEPPAGPSGLGSGTMAAGGGAPMADNNEGADGVGSSSGNWHCDSTWLGDRVITTSTRTWALPTYNNHLYKQISNGTSGGSTNDNTYFGYSTPWGYFDFNRFHCHFSPRDWQRLINNNWGFRPKRLSFKLFNIQVKEVTQNEGTKTIANNLTSTIQVFTDSEYQLPYVLGSAHQGCLPPFPADVFMIPQYGYLTLNNGSQAVGRSSFYCLEYFPSQMLRTGNNFEFSYTFEDVPFHSSYAHSQSLDRLMNPLIDQYLYYLSRTQSTGGTQGTQQLLFSQAGPANMSAQAKNWLPGPCYRQQRVSTTLSQNNNSNIAWTGATKYHLNGRDSLVNPGVAMATHKDDEERFFPSSGVLMFGKQGAGRDNVDYSSVMLTSEEEIKTTNPVATEQYGVVADNLQQTNTGPIVGNVNSQGALPGMVWQNRDVYLQGPIWAKIPHTDGNFHPSPLMGGFGLKHPPPQILIKNTPVPADPPTTFSQAKLASFITQYSTGQVSVEIEWELQKENSKRWNPEIQYTSNLCKSTNVDFAVNTEGTYSEPRPIGTRYLTRNL

SEQ ID NO: 719 - protein, 738 aa, synthetic construct
MAADGYLPDWLEDNLSEGIREWWDLKPGAPKPKANQQKQDDGRGLVLPGYKYLGPFNGLDKGEPVNAADAAALEHDKAYDQQLKAGDNPYLRYNHADAEFQERLQEDTSFGGNLGRAVFQAKKRVLEPLGLVEEAAKTAPGKKRPVEPSPQRSPDSSTGIGKKGQQPAKKRLNFGQTGDSESVPDPQPIGEPPAGPSGLGSGTMAAGGGAPMADNNEGADGVGSSSGNWHCDSTWLGDRVITTSTRTWALPTYNNHLYKQISNGTSGGSTNDNTYFGYSTPWGYFDFNRFHCHFSPRDWQRLINNNWGFRPKRLSFKLFNIQVKEVTQNEGTKTIANNLTSTIQVFTDSEYQLPYVLGSAHQGCLPPFPADVFMIPQYGYLTLNNGSQAVGRSSFYCLEYFPSQMLRTGNNFEFSYTFEDVPFHSSYAHSQSLDRLMNPLIDQYLYYLSRTQSTGGTQGTQQLLFSQAGPANMSAQAKNWLPGPCYRQQRVSTTLSQNNNSNFAWTRATKYHLNGRDSLVNPGVAMATHKDDEERFFPSSGVLMFGKQGAGRDNVDYSSVMLTSEEEIKTTNPVATEQYGVVADNLQQTNTGPIVGNVNSQGALPGMVWQNRDVYLQGPIWAKIPHTDGNFHPSPLMGGFGLKHPPPQILIKNTPVPADPPTTFSQAKLASFITQYSTGQVSVEIEWELQKENSKRWNPEIQYTSNLCKSTNVDFAVNTEGTYSEPRPIGTRYLTRNL

SEQ ID NO: 720 - protein, 738 aa, synthetic construct
MAADGYLPDWLEDNLSEGIREWWDLKPGAPKPKANQQKQDDGRGLVLPGYKYLGPFNGLDKGEPVNAADAAALEHDKAYDQQLKAGDNPYLRYNHADAEFQERLQEDTSFGGNLGRAVFQAKKRVLEPLGLVEEAAKTAPGKKRPVEPSPQRSPDSSTGIGKKGQQPAKKRLNFGQTGDSESVPDPQPIGEPPAGPSGLGSGTMAAGGGAPMADNNEGADGVGSSSGNWHCDSTWLGDRVITTSTRTWALPTYNNHLYKQISNGTSGGSTNDNTYFGYSTPWGYFDFNRFHCHFSPRDWQRLINNNWGFRPKRLSFKLFNIQVKEVTQNEGTKTIANNLTSTIQVFTDSEYQLPYVLGSAHQGCLPPFPADVFMIPQYGYLTLNNGSQAVGRSSFYCLEYFPSQMLRTGNNFEFSYTFEDVPFHSSYAHSQSLDRLMNPLIDQYLYYLSRTQSTGGTQGTQQLLFSQAGPANMSAQAKNWLPGPCYRQQRVSTTLSQNNNSNIAWTRATKYHLNGRDSLVNPGVAMATHKDDEERFFPSSGVLMFGKQGAGRDNVDYSSVMLTSEEEIKTTNPVATEQYGVVADNLQQTNTGPIVGNVNSQGALPGMVWQNRDVYLQGPIWAKIPHTDGNFHPSPLMGGFGLKHPPPQILIKNTPVPADPPTTFSQAKLASFITQYSTGQVSVEIEWELQKENSKRWNPEIQYTSNLCKSTNVDFAVNTEGTYSEPRPIGTRYLTRNL

SEQ ID NO: 721 - protein, 738 aa, synthetic construct
MAADGYLPDWLEDNLSEGIREWWDLKPGAPKPKANQQKQDDGRGLVLPGYKYLGPFNGLDKGEPVNAADAAALEHDKAYDQQLKAGDNPYLRYNHADAEFQERLQEDTSFGGNLGRAVFQAKKRVLEPLGLVEEAAKTAPGKKRPVEPSPQRSPDSSTGIGKKGQQPAKKRLNFGQTGDSESVPDPQPIGEPPAGPSGLGSGTMAAGGGAPMADNNEGADGVGSSSGNWHCDSTWLGDRVITTSTRTWALPTYNNHLYKQISNGTSGGSTNDNTYFGYSTPWGYFDFNRFHCHFSPRDWQRLINNNWGFRPKRLSFKLFNIQVKEVTQNEGTKTIANNLTSTIQVFGDSEYQLPYVLGSAHQGCLPPFPADVFMIPQYGYLTLNNGSQAVGRSSFYCLEYFPSQMLRTGNNFEFSYTFEDVPFHSSYAHSQSLDRLMNPLIDQYLYYLSRTQSTGGTQGTQQLLFSQAGPANMSAQAKNWLPGPCYRQQRVSTTLSQNNNSNFAWTGATKYHLNGRDSLVNPGVAMATHKDDEERFFPSSGVLMFGKQGAGRDNVDYSSVMLTSEEEIKTTNPVATEQYGVVADNLQQTNTGPIVGNVNSQGALPGMVWQNRDVYLQGPIWAKIPHTDGNFHPSPLMGGFGLKHPPPQILIKNTPVPADPPTTFSQAKLASFITQYSTGQVSVEIEWELQKENSKRWNPEIQYTSNLYKSTNVDFAVNTEGTYSEPRPIGTRYLTRNL

SEQ ID NO: 722 - protein, 738 aa, synthetic construct
MAADGYLPDWLEDNLSEGIREWWDLKPGAPKPKANQQKQDDGRGLVLPGYKYLGPFNGLDKGEPVNAADAAALEHDKAYDQQLKAGDNPYLRYNHADAEFQERLQEDTSFGGNLGRAVFQAKKRVLEPLGLVEEAAKTAPGKKRPVEPSPQRSPDSSTGIGKKGQQPAKKRLNFGQTGDSESVPDPQPIGEPPAGPSGLGSGTMAAGGGAPMADNNEGADGVGSSSGNWHCDSTWLGDRVITTSTRTWALPTYNNHLYKQISNGTSGGSTNDNTYFGYSTPWGYFDFNRFHCHFSPRDWQRLINNNWGFRPKRLSFKLFNIQVKEVTQNEGTKTIANNLTSTIQVFGDSEYQLPYVLGSAHQGCLPPFPADVFMIPQYGYLTLNNGSQAVGRSSFYCLEYFPSQMLRTGNNFEFSYTFEDVPFHSSYAHSQSLDRLMNPLIDQYLYYLSRTQSTGGTQGTQQLLFSQAGPANMSAQAKNWLPGPCYRQQRVSTTLSQNNNSNIAWTGATKYHLNGRDSLVNPGVAMATHKDDEERFFPSSGVLMFGKQGAGRDNVDYSSVMLTSEEEIKTTNPVATEQYGVVADNLQQTNTGPIVGNVNSQGALPGMVWQNRDVYLQGPIWAKIPHTDGNFHPSPLMGGFGLKHPPPQILIKNTPVPADPPTTFSQAKLASFITQYSTGQVSVEIEWELQKENSKRWNPEIQYTSNLYKSTNVDFAVNTEGTYSEPRPIGTRYLTRNL

SEQ ID NO: 723 - protein, 738 aa, synthetic construct
MAADGYLPDWLEDNLSEGIREWWDLKPGAPKPKANQQKQDDGRGLVLPGYKYLGPFNGLDKGEPVNAADAAALEHDKAYDQQLKAGDNPYLRYNHADAEFQERLQEDTSFGGNLGRAVFQAKKRVLEPLGLVEEAAKTAPGKKRPVEPSPQRSPDSSTGIGKKGQQPAKKRLNFGQTGDSESVPDPQPIGEPPAGPSGLGSGTMAAGGGAPMADNNEGADGVGSSSGNWHCDSTWLGDRVITTSTRTWALPTYNNHLYKQISNGTSGGSTNDNTYFGYSTPWGYFDFNRFHCHFSPRDWQRLINNNWGFRPKRLSFKLFNIQVKEVTQNEGTKTIANNLTSTIQVFGDSEYQLPYVLGSAHQGCLPPFPADVFMIPQYGYLTLNNGSQAVGRSSFYCLEYFPSQMLRTGNNFEFSYTFEDVPFHSSYAHSQSLDRLMNPLIDQYLYYLSRTQSTGGTQGTQQLLFSQAGPANMSAQAKNWLPGPCYRQQRVSTTLSQNNNSNFAWTRATKYHLNGRDSLVNPGVAMATHKDDEERFFPSSGVLMFGKQGAGRDNVDYSSVMLTSEEEIKTTNPVATEQYGVVADNLQQTNTGPIVGNVNSQGALPGMVWQNRDVYLQGPIWAKIPHTDGNFHPSPLMGGFGLKHPPPQILIKNTPVPADPPTTFSQAKLASFITQYSTGQVSVEIEWELQKENSKRWNPEIQYTSNLYKSTNVDFAVNTEGTYSEPRPIGTRYLTRNL

SEQ ID NO: 724 - protein, 738 aa, synthetic construct
MAADGYLPDWLEDNLSEGIREWWDLKPGAPKPKANQQKQDDGRGLVLPGYKYLGPFNGLDKGEPVNAADAAALEHDKAYDQQLKAGDNPYLRYNHADAEFQERLQEDTSFGGNLGRAVFQAKKRVLEPLGLVEEAAKTAPGKKRPVEPSPQRSPDSSTGIGKKGQQPAKKRLNFGQTGDSESVPDPQPIGEPPAGPSGLGSGTMAAGGGAPMADNNEGADGVGSSSGNWHCDSTWLGDRVITTSTRTWALPTYNNHLYKQISNGTSGGSTNDNTYFGYSTPWGYFDFNRFHCHFSPRDWQRLINNNWGFRPKRLSFKLFNIQVKEVTQNEGTKTIANNLTSTIQVFGDSEYQLPYVLGSAHQGCLPPFPADVFMIPQYGYLTLNNGSQAVGRSSFYCLEYFPSQMLRTGNNFEFSYTFEDVPFHSSYAHSQSLDRLMNPLIDQYLYYLSRTQSTGGTQGTQQLLFSQAGPANMSAQAKNWLPGPCYRQQRVSTTLSQNNNSNFAWTGATKYHLNGRDSLVNPGVAMATHKDDEERFFPSSGVLMFGKQGAGRDNVDYSSVMLTSEEEIKTTNPVATEQYGVVADNLQQTNTGPIVGNVNSQGALPGMVWQNRDVYLQGPIWAKIPHTDGNFHPSPLMGGFGLKHPPPQILIKNTPVPADPPTTFSQAKLASFITQYSTGQVSVEIEWELQKENSKRWNPEIQYTSNLCKSTNVDFAVNTEGTYSEPRPIGTRYLTRNL

SEQ ID NO: 725 - protein, 738 aa, synthetic construct
MAADGYLPDWLEDNLSEGIREWWDLKPGAPKPKANQQKQDDGRGLVLPGYKYLGPFNGLDKGEPVNAADAAALEHDKAYDQQLKAGDNPYLRYNHADAEFQERLQEDTSFGGNLGRAVFQAKKRVLEPLGLVEEAAKTAPGKKRPVEPSPQRSPDSSTGIGKKGQQPAKKRLNFGQTGDSESVPDPQPIGEPPAGPSGLGSGTMAAGGGAPMADNNEGADGVGSSSGNWHCDSTWLGDRVITTSTRTWALPTYNNHLYKQISNGTSGGSTNDNTYFGYSTPWGYFDFNRFHCHFSPRDWQRLINNNWGFRPKRLSFKLFNIQVKEVTQNEGTKTIANNLTSTIQVFGDSEYQLPYVLGSAHQGCLPPFPADVFMIPQYGYLTLNNGSQAVGRSSFYCLEYFPSQMLRTGNNFEFSYTFEDVPFHSSYAHSQSLDRLMNPLIDQYLYYLSRTQSTGGTQGTQQLLFSQAGPANMSAQAKNWLPGPCYRQQRVSTTLSQNNNSNIAWTRATKYHLNGRDSLVNPGVAMATHKDDEERFFPSSGVLMFGKQGAGRDNVDYSSVMLTSEEEIKTTNPVATEQYGVVADNLQQTNTGPIVGNVNSQGALPGMVWQNRDVYLQGPIWAKIPHTDGNFHPSPLMGGFGLKHPPPQILIKNTPVPADPPTTFSQAKLASFITQYSTGQVSVEIEWELQKENSKRWNPEIQYTSNLYKSTNVDFAVNTEGTYSEPRPIGTRYLTRNL

SEQ ID NO: 726 - protein, 738 aa, synthetic construct
MAADGYLPDWLEDNLSEGIREWWDLKPGAPKPKANQQKQDDGRGLVLPGYKYLGPFNGLDKGEPVNAADAAALEHDKAYDQQLKAGDNPYLRYNHADAEFQERLQEDTSFGGNLGRAVFQAKKRVLEPLGLVEEAAKTAPGKKRPVEPSPQRSPDSSTGIGKKGQQPAKKRLNFGQTGDSESVPDPQPIGEPPAGPSGLGSGTMAAGGGAPMADNNEGADGVGSSSGNWHCDSTWLGDRVITTSTRTWALPTYNNHLYKQISNGTSGGSTNDNTYFGYSTPWGYFDFNRFHCHFSPRDWQRLINNNWGFRPKRLSFKLFNIQVKEVTQNEGTKTIANNLTSTIQVFGDSEYQLPYVLGSAHQGCLPPFPADVFMIPQYGYLTLNNGSQAVGRSSFYCLEYFPSQMLRTGNNFEFSYTFEDVPFHSSYAHSQSLDRLMNPLIDQYLYYLSRTQSTGGTQGTQQLLFSQAGPANMSAQAKNWLPGPCYRQQRVSTTLSQNNNSNIAWTGATKYHLNGRDSLVNPGVAMATHKDDEERFFPSSGVLMFGKQGAGRDNVDYSSVMLTSEEEIKTTNPVATEQYGVVADNLQQTNTGPIVGNVNSQGALPGMVWQNRDVYLQGPIWAKIPHTDGNFHPSPLMGGFGLKHPPPQILIKNTPVPADPPTTFSQAKLASFITQYSTGQVSVEIEWELQKENSKRWNPEIQYTSNLCKSTNVDFAVNTEGTYSEPRPIGTRYLTRNL

SEQ ID NO: 727 - protein, 738 aa, synthetic construct
MAADGYLPDWLEDNLSEGIREWWDLKPGAPKPKANQQKQDDGRGLVLPGYKYLGPFNGLDKGEPVNAADAAALEHDKAYDQQLKAGDNPYLRYNHADAEFQERLQEDTSFGGNLGRAVFQAKKRVLEPLGLVEEAAKTAPGKKRPVEPSPQRSPDSSTGIGKKGQQPAKKRLNFGQTGDSESVPDPQPIGEPPAGPSGLGSGTMAAGGGAPMADNNEGADGVGSSSGNWHCDSTWLGDRVITTSTRTWALPTYNNHLYKQISNGTSGGSTNDNTYFGYSTPWGYFDFNRFHCHFSPRDWQRLINNNWGFRPKRLSFKLFNIQVKEVTQNEGTKTIANNLTSTIQVFGDSEYQLPYVLGSAHQGCLPPFPADVFMIPQYGYLTLNNGSQAVGRSSFYCLEYFPSQMLRTGNNFEFSYTFEDVPFHSSYAHSQSLDRLMNPLIDQYLYYLSRTQSTGGTQGTQQLLFSQAGPANMSAQAKNWLPGPCYRQQRVSTTLSQNNNSNFAWTRATKYHLNGRDSLVNPGVAMATHKDDEERFFPSSGVLMFGKQGAGRDNVDYSSVMLTSEEEIKTTNPVATEQYGVVADNLQQTNTGPIVGNVNSQGALPGMVWQNRDVYLQGPIWAKIPHTDGNFHPSPLMGGFGLKHPPPQILIKNTPVPADPPTTFSQAKLASFITQYSTGQVSVEIEWELQKENSKRWNPEIQYTSNLCKSTNVDFAVNTEGTYSEPRPIGTRYLTRNL

SEQ ID NO: 728 - protein, 738 aa, synthetic construct
MAADGYLPDWLEDNLSEGIREWWDLKPGAPKPKANQQKQDDGRGLVLPGYKYLGPFNGLDKGEPVNAADAAALEHDKAYDQQLKAGDNPYLRYNHADAEFQERLQEDTSFGGNLGRAVFQAKKRVLEPLGLVEEAAKTAPGKKRPVEPSPQRSPDSSTGIGKKGQQPAKKRLNFGQTGDSESVPDPQPIGEPPAGPSGLGSGTMAAGGGAPMADNNEGADGVGSSSGNWHCDSTWLGDRVITTSTRTWALPTYNNHLYKQISNGTSGGSTNDNTYFGYSTPWGYFDFNRFHCHFSPRDWQRLINNNWGFRPKRLSFKLFNIQVKEVTQNEGTKTIANNLTSTIQVFGDSEYQLPYVLGSAHQGCLPPFPADVFMIPQYGYLTLNNGSQAVGRSSFYCLEYFPSQMLRTGNNFEFSYTFEDVPFHSSYAHSQSLDRLMNPLIDQYLYYLSRTQSTGGTQGTQQLLFSQAGPANMSAQAKNWLPGPCYRQQRVSTTLSQNNNSNIAWTRATKYHLNGRDSLVNPGVAMATHKDDEERFFPSSGVLMFGKQGAGRDNVDYSSVMLTSEEEIKTTNPVATEQYGVVADNLQQTNTGPIVGNVNSQGALPGMVWQNRDVYLQGPIWAKIPHTDGNFHPSPLMGGFGLKHPPPQILIKNTPVPADPPTTFSQAKLASFITQYSTGQVSVEIEWELQKENSKRWNPEIQYTSNLCKSTNVDFAVNTEGTYSEPRPIGTRYLTRNL

SEQ ID NO: 729 - protein, 738 aa, synthetic construct
MAADGYLPDWLEDNLSEGIREWWDLKPGAPKPKANQQKQDDGRGLVLPGYKYLGPFNGLDKGEPVNAADAAALEHDKAYDQQLKAGDNPYLRYNHADAEFQERLQEDTSFGGNLGRAVFQAKKRVLEPLGLVEEAAKTAPGKKRPVEPSPQRSPDSSTGIGKKGQQPAKKRLNFGQTGDSESVPDPQPIGEPPAGPSGLGSGTMAAGGGAPMADNNEGADGVGSSSGNWHCDSTWLGDRVITTSTRTWALPTYNNHLYKQISNGTSGGSTNDNTYFGYSTPWGYFDFNRFHCHFSPRDWQRLINNNWGFRPKRLSFKLFNIQVKEVTQNEGTKTIANNLTSTIQVFADSEYQLPYVLGSAHQGCLPPFPADVFMIPQYGYLTLNNGSQAVGRSSFYCLEYFPSQMLRTGNNFEFSYTFEDVPFHSSYAHSQSLDRLMNPLIDQYLYYLSRTQSTGGTQGTQQLLFSQAGPANMSAQAKNWLPGPCYRQQRVSTTLSQNNNSNFAWTGATKYHLNGRDSLVNPGVAMATHKDDEERFFPSSGVLMFGKQGAGRDNVDYSSVMLTSEEEIKTTNPVATEQYGVVADNLQQTNTGPIVGNVNSQGALPGMVWQNRDVYLQGPIWAKIPHTDGNFHPSPLMGGFGLKHPPPQILIKNTPVPADPPTTFSQAKLASFITQYSTGQVSVEIEWELQKENSKRWNPEIQYTSNLYKSTNVDFAVNTEGTYSEPRPIGTRYLTRNL

SEQ ID NO: 730 - protein, 738 aa, synthetic construct
MAADGYLPDWLEDNLSEGIREWWDLKPGAPKPKANQQKQDDGRGLVLPGYKYLGPFNGLDKGEPVNAADAAALEHDKAYDQQLKAGDNPYLRYNHADAEFQERLQEDTSFGGNLGRAVFQAKKRVLEPLGLVEEAAKTAPGKKRPVEPSPQRSPDSSTGIGKKGQQPAKKRLNFGQTGDSESVPDPQPIGEPPAGPSGLGSGTMAAGGGAPMADNNEGADGVGSSSGNWHCDSTWLGDRVITTSTRTWALPTYNNHLYKQISNGTSGGSTNDNTYFGYSTPWGYFDFNRFHCHFSPRDWQRLINNNWGFRPKRLSFKLFNIQVKEVTQNEGTKTIANNLTSTIQVFADSEYQLPYVLGSAHQGCLPPFPADVFMIPQYGYLTLNNGSQAVGRSSFYCLEYFPSQMLRTGNNFEFSYTFEDVPFHSSYAHSQSLDRLMNPLIDQYLYYLSRTQSTGGTQGTQQLLFSQAGPANMSAQAKNWLPGPCYRQQRVSTTLSQNNNSNIAWTGATKYHLNGRDSLVNPGVAMATHKDDEERFFPSSGVLMFGKQGAGRDNVDYSSVMLTSEEEIKTTNPVATEQYGVVADNLQQTNTGPIVGNVNSQGALPGMVWQNRDVYLQGPIWAKIPHTDGNFHPSPLMGGFGLKHPPPQILIKNTPVPADPPTTFSQAKLASFITQYSTGQVSVEIEWELQKENSKRWNPEIQYTSNLYKSTNVDFAVNTEGTYSEPRPIGTRYLTRNL

SEQ ID NO: 731 - protein, 738 aa, synthetic construct
MAADGYLPDWLEDNLSEGIREWWDLKPGAPKPKANQQKQDDGRGLVLPGYKYLGPFNGLDKGEPVNAADAAALEHDKAYDQQLKAGDNPYLRYNHADAEFQERLQEDTSFGGNLGRAVFQAKKRVLEPLGLVEEAAKTAPGKKRPVEPSPQRSPDSSTGIGKKGQQPAKKRLNFGQTGDSESVPDPQPIGEPPAGPSGLGSGTMAAGGGAPMADNNEGADGVGSSSGNWHCDSTWLGDRVITTSTRTWALPTYNNHLYKQISNGTSGGSTNDNTYFGYSTPWGYFDFNRFHCHFSPRDWQRLINNNWGFRPKRLSFKLFNIQVKEVTQNEGTKTIANNLTSTIQVFADSEYQLPYVLGSAHQGCLPPFPADVFMIPQYGYLTLNNGSQAVGRSSFYCLEYFPSQMLRTGNNFEFSYTFEDVPFHSSYAHSQSLDRLMNPLIDQYLYYLSRTQSTGGTQGTQQLLFSQAGPANMSAQAKNWLPGPCYRQQRVSTTLSQNNNSNFAWTRATKYHLNGRDSLVNPGVAMATHKDDEERFFPSSGVLMFGKQGAGRDNVDYSSVMLTSEEEIKTTNPVATEQYGVVADNLQQTNTGPIVGNVNSQGALPGMVWQNRDVYLQGPIWAKIPHTDGNFHPSPLMGGFGLKHPPPQILIKNTPVPADPPTTFSQAKLASFITQYSTGQVSVEIEWELQKENSKRWNPEIQYTSNLYKSTNVDFAVNTEGTYSEPRPIGTRYLTRNL

SEQ ID NO: 732 - protein, 738 aa, synthetic construct
MAADGYLPDWLEDNLSEGIREWWDLKPGAPKPKANQQKQDDGRGLVLPGYKYLGPFNGLDKGEPVNAADAAALEHDKAYDQQLKAGDNPYLRYNHADAEFQERLQEDTSFGGNLGRAVFQAKKRVLEPLGLVEEAAKTAPGKKRPVEPSPQRSPDSSTGIGKKGQQPAKKRLNFGQTGDSESVPDPQPIGEPPAGPSGLGSGTMAAGGGAPMADNNEGADGVGSSSGNWHCDSTWLGDRVITTSTRTWALPTYNNHLYKQISNGTSGGSTNDNTYFGYSTPWGYFDFNRFHCHFSPRDWQRLINNNWGFRPKRLSFKLFNIQVKEVTQNEGTKTIANNLTSTIQVFADSEYQLPYVLGSAHQGCLPPFPADVFMIPQYGYLTLNNGSQAVGRSSFYCLEYFPSQMLRTGNNFEFSYTFEDVPFHSSYAHSQSLDRLMNPLIDQYLYYLSRTQSTGGTQGTQQLLFSQAGPANMSAQAKNWLPGPCYRQQRVSTTLSQNNNSNFAWTGATKYHLNGRDSLVNPGVAMATHKDDEERFFPSSGVLMFGKQGAGRDNVDYSSVMLTSEEEIKTTNPVATEQYGVVADNLQQTNTGPIVGNVNSQGALPGMVWQNRDVYLQGPIWAKIPHTDGNFHPSPLMGGFGLKHPPPQILIKNTPVPADPPTTFSQAKLASFITQYSTGQVSVEIEWELQKENSKRWNPEIQYTSNLCKSTNVDFAVNTEGTYSEPRPIGTRYLTRNL

SEQ ID NO: 733 - protein, 738 aa, synthetic construct
MAADGYLPDWLEDNLSEGIREWWDLKPGAPKPKANQQKQDDGRGLVLPGYKYLGPFNGLDKGEPVNAADAAALEHDKAYDQQLKAGDNPYLRYNHADAEFQERLQEDTSFGGNLGRAVFQAKKRVLEPLGLVEEAAKTAPGKKRPVEPSPQRSPDSSTGIGKKGQQPAKKRLNFGQTGDSESVPDPQPIGEPPAGPSGLGSGTMAAGGGAPMADNNEGADGVGSSSGNWHCDSTWLGDRVITTSTRTWALPTYNNHLYKQISNGTSGGSTNDNTYFGYSTPWGYFDFNRFHCHFSPRDWQRLINNNWGFRPKRLSFKLFNIQVKEVTQNEGTKTIANNLTSTIQVFADSEYQLPYVLGSAHQGCLPPFPADVFMIPQYGYLTLNNGSQAVGRSSFYCLEYFPSQMLRTGNNFEFSYTFEDVPFHSSYAHSQSLDRLMNPLIDQYLYYLSRTQSTGGTQGTQQLLFSQAGPANMSAQAKNWLPGPCYRQQRVSTTLSQNNNSNIAWTRATKYHLNGRDSLVNPGVAMATHKDDEERFFPSSGVLMFGKQGAGRDNVDYSSVMLTSEEEIKTTNPVATEQYGVVADNLQQTNTGPIVGNVNSQGALPGMVWQNRDVYLQGPIWAKIPHTDGNFHPSPLMGGFGLKHPPPQILIKNTPVPADPPTTFSQAKLASFITQYSTGQVSVEIEWELQKENSKRWNPEIQYTSNLYKSTNVDFAVNTEGTYSEPRPIGTRYLTRNL

SEQ ID NO: 734 - protein, 738 aa, synthetic construct
MAADGYLPDWLEDNLSEGIREWWDLKPGAPKPKANQQKQDDGRGLVLPGYKYLGPFNGLDKGEPVNAADAAALEHDKAYDQQLKAGDNPYLRYNHADAEFQERLQEDTSFGGNLGRAVFQAKKRVLEPLGLVEEAAKTAPGKKRPVEPSPQRSPDSSTGIGKKGQQPAKKRLNFGQTGDSESVPDPQPIGEPPAGPSGLGSGTMAAGGGAPMADNNEGADGVGSSSGNWHCDSTWLGDRVITTSTRTWALPTYNNHLYKQISNGTSGGSTNDNTYFGYSTPWGYFDFNRFHCHFSPRDWQRLINNNWGFRPKRLSFKLFNIQVKEVTQNEGTKTIANNLTSTIQVFADSEYQLPYVLGSAHQGCLPPFPADVFMIPQYGYLTLNNGSQAVGRSSFYCLEYFPSQMLRTGNNFEFSYTFEDVPFHSSYAHSQSLDRLMNPLIDQYLYYLSRTQSTGGTQGTQQLLFSQAGPANMSAQAKNWLPGPCYRQQRVSTTLSQNNNSNIAWTGATKYHLNGRDSLVNPGVAMATHKDDEERFFPSSGVLMFGKQGAGRDNVDYSSVMLTSEEEIKTTNPVATEQYGVVADNLQQTNTGPIVGNVNSQGALPGMVWQNRDVYLQGPIWAKIPHTDGNFHPSPLMGGFGLKHPPPQILIKNTPVPADPPTTFSQAKLASFITQYSTGQVSVEIEWELQKENSKRWNPEIQYTSNLCKSTNVDFAVNTEGTYSEPRPIGTRYLTRNL

SEQ ID NO: 735 - protein, 738 aa, synthetic construct
MAADGYLPDWLEDNLSEGIREWWDLKPGAPKPKANQQKQDDGRGLVLPGYKYLGPFNGLDKGEPVNAADAAALEHDKAYDQQLKAGDNPYLRYNHADAEFQERLQEDTSFGGNLGRAVFQAKKRVLEPLGLVEEAAKTAPGKKRPVEPSPQRSPDSSTGIGKKGQQPAKKRLNFGQTGDSESVPDPQPIGEPPAGPSGLGSGTMAAGGGAPMADNNEGADGVGSSSGNWHCDSTWLGDRVITTSTRTWALPTYNNHLYKQISNGTSGGSTNDNTYFGYSTPWGYFDFNRFHCHFSPRDWQRLINNNWGFRPKRLSFKLFNIQVKEVTQNEGTKTIANNLTSTIQVFADSEYQLPYVLGSAHQGCLPPFPADVFMIPQYGYLTLNNGSQAVGRSSFYCLEYFPSQMLRTGNNFEFSYTFEDVPFHSSYAHSQSLDRLMNPLIDQYLYYLSRTQSTGGTQGTQQLLFSQAGPANMSAQAKNWLPGPCYRQQRVSTTLSQNNNSNFAWTRATKYHLNGRDSLVNPGVAMATHKDDEERFFPSSGVLMFGKQGAGRDNVDYSSVMLTSEEEIKTTNPVATEQYGVVADNLQQTNTGPIVGNVNSQGALPGMVWQNRDVYLQGPIWAKIPHTDGNFHPSPLMGGFGLKHPPPQILIKNTPVPADPPTTFSQAKLASFITQYSTGQVSVEIEWELQKENSKRWNPEIQYTSNLCKSTNVDFAVNTEGTYSEPRPIGTRYLTRNL

SEQ ID NO: 736 - protein, 738 aa, synthetic construct
MAADGYLPDWLEDNLSEGIREWWDLKPGAPKPKANQQKQDDGRGLVLPGYKYLGPFNGLDKGEPVNAADAAALEHDKAYDQQLKAGDNPYLRYNHADAEFQERLQEDTSFGGNLGRAVFQAKKRVLEPLGLVEEAAKTAPGKKRPVEPSPQRSPDSSTGIGKKGQQPAKKRLNFGQTGDSESVPDPQPIGEPPAGPSGLGSGTMAAGGGAPMADNNEGADGVGSSSGNWHCDSTWLGDRVITTSTRTWALPTYNNHLYKQISNGTSGGSTNDNTYFGYSTPWGYFDFNRFHCHFSPRDWQRLINNNWGFRPKRLSFKLFNIQVKEVTQNEGTKTIANNLTSTIQVFADSEYQLPYVLGSAHQGCLPPFPADVFMIPQYGYLTLNNGSQAVGRSSFYCLEYFPSQMLRTGNNFEFSYTFEDVPFHSSYAHSQSLDRLMNPLIDQYLYYLSRTQSTGGTQGTQQLLFSQAGPANMSAQAKNWLPGPCYRQQRVSTTLSQNNNSNIAWTRATKYHLNGRDSLVNPGVAMATHKDDEERFFPSSGVLMFGKQGAGRDNVDYSSVMLTSEEEIKTTNPVATEQYGVVADNLQQTNTGPIVGNVNSQGALPGMVWQNRDVYLQGPIWAKIPHTDGNFHPSPLMGGFGLKHPPPQILIKNTPVPADPPTTFSQAKLASFITQYSTGQVSVEIEWELQKENSKRWNPEIQYTSNLCKSTNVDFAVNTEGTYSEPRPIGTRYLTRNL

SEQ ID NO: 737 - protein, 729 aa, synthetic construct
MAADGYLPDWLEDNLSEGIREWWDLKPGAPKPKANQQKQDNGRGLVLPGYKYLGPFNGLDKGEPVAADAAALEHDKAYDQQLQAGDNPYLRYHADAEFQERLQEDTSFGGNLGRAVFQAKKRVLEPLGLVESPVKTAPGKKRPVEPSPQRSPDSSTGIGKKGQQPAKKRLNFGQTGDSESVPDPQPIGEPPAGPSGLGSGTMAAGGGAPMADNNEGADGVGSSSGNWHCDSTWLGDRVITTSTRTWALPTYNNHLYKQISNGTSGGSTNDNTYFGYSTPWGYFDFNRFHCHFSPRDWQRLINNNWGFRPKRLNFLFNIQVKEVTQNEGTKTIANNLTSTIQVFGDSEYQLPYVLGSAHQGCLPPFPADVFMIPQYGYLTLNNGSQAVGRSSFYCLEYFPSQMLRTGNFEFSYFEDVPFHSSYAHSQSLDRLMNPLIDQYLYYLSRTQSTGGTAGTQQLLFSQAGPNNMSAQAKNWLPGPCYRQQRVSTTLSQNNNSNFAWTGATKYHLNGRDSLVNPGVAMATHDDEERFFPSSGVLMFGKQGAGDNVDYSSVMLTSEEEIKTTNPVATEQYGWADNLQQQNAAPIVGAVSQGALPGMVWQNRDVYLQGPIWAKIPHTDGNFHPSPLMGGFGLKHPPPQILIKNTPVPADPPTTFNQAKLASFITQYSTGQVSVEIEWELQKENSKRWNPEIQYTSNYYKSTNVDFAVNTEGTYSEPRPIGTRYLTRNL

SEQ ID NO: 738 - protein, 729 aa, synthetic construct
MAADGYLPDWLEDNLSEGIREWWDLKPGAPKPKANQQKQDNGRGLVLPGYKYLGPFNGLDKGEPVAADAAALEHDKAYDQQLQAGDNPYLRYHADAEFQERLQEDTSFGGNLGRAVFQAKKRVLEPLGLVESPVKTAPGKKRPVEPSPQRSPDSSTGIGKKGQQPAKKRLNFGQTGDSESVPDPQPIGEPPAGPSGLGSGTMAAGGGAPMADNNEGADGVGSSSGNWHCDSTWLGDRVITTSTRTWALPTYNNHLYKQISNGTSGGSTNDNTYFGYSTPWGYFDFNRFHCHFSPRDWQRLINNNWGFRPKRLNFLFNIQVKEVTQNEGTKTIANNLTSTIQVFGDSEYQLPYVLGSAHQGCLPPFPADVFMIPQYGYLTLNNGSQAVGRSSFYCLEYFPSQMLRTGNFEFSYFEDVPFHSSYAHSQSLDRLMNPLIDQYLYYLSRTQSTGGTAGTQQLLFSQAGPNNMSAQAKNWLPGPCYRQQRVSTTLSQNNNSNIAWTGATKYHLNGRDSLVNPGVAMATHDDEERFFPSSGVLMFGKQGAGDNVDYSSVMLTSEEEIKTTNPVATEQYGWADNLQQQNAAPIVGAVSQGALPGMVWQNRDVYLQGPIWAKIPHTDGNFHPSPLMGGFGLKHPPPQILIKNTPVPADPPTTFNQAKLASFITQYSTGQVSVEIEWELQKENSKRWNPEIQYTSNYYKSTNVDFAVNTEGTYSEPRPIGTRYLTRNL

SEQ ID NO: 739 - protein, 729 aa, synthetic construct
MAADGYLPDWLEDNLSEGIREWWDLKPGAPKPKANQQKQDNGRGLVLPGYKYLGPFNGLDKGEPVAADAAALEHDKAYDQQLQAGDNPYLRYHADAEFQERLQEDTSFGGNLGRAVFQAKKRVLEPLGLVESPVKTAPGKKRPVEPSPQRSPDSSTGIGKKGQQPAKKRLNFGQTGDSESVPDPQPIGEPPAGPSGLGSGTMAAGGGAPMADNNEGADGVGSSSGNWHCDSTWLGDRVITTSTRTWALPTYNNHLYKQISNGTSGGSTNDNTYFGYSTPWGYFDFNRFHCHFSPRDWQRLINNNWGFRPKRLNFLFNIQVKEVTQNEGTKTIANNLTSTIQVFGDSEYQLPYVLGSAHQGCLPPFPADVFMIPQYGYLTLNNGSQAVGRSSFYCLEYFPSQMLRTGNFEFSYFEDVPFHSSYAHSQSLDRLMNPLIDQYLYYLSRTQSTGGTAGTQQLLFSQAGPNNMSAQAKNWLPGPCYRQQRVSTTLSQNNNSNFAWTRATKYHLNGRDSLVNPGVAMATHDDEERFFPSSGVLMFGKQGAGDNVDYSSVMLTSEEEIKTTNPVATEQYGWADNLQQQNAAPIVGAVSQGALPGMVWQNRDVYLQGPIWAKIPHTDGNFHPSPLMGGFGLKHPPPQILIKNTPVPADPPTTFNQAKLASFITQYSTGQVSVEIEWELQKENSKRWNPEIQYTSNYYKSTNVDFAVNTEGTYSEPRPIGTRYLTRNL

SEQ ID NO: 740 - protein, 729 aa, synthetic construct
MAADGYLPDWLEDNLSEGIREWWDLKPGAPKPKANQQKQDNGRGLVLPGYKYLGPFNGLDKGEPVAADAAALEHDKAYDQQLQAGDNPYLRYHADAEFQERLQEDTSFGGNLGRAVFQAKKRVLEPLGLVESPVKTAPGKKRPVEPSPQRSPDSSTGIGKKGQQPAKKRLNFGQTGDSESVPDPQPIGEPPAGPSGLGSGTMAAGGGAPMADNNEGADGVGSSSGNWHCDSTWLGDRVITTSTRTWALPTYNNHLYKQISNGTSGGSTNDNTYFGYSTPWGYFDFNRFHCHFSPRDWQRLINNNWGFRPKRLNFLFNIQVKEVTQNEGTKTIANNLTSTIQVFGDSEYQLPYVLGSAHQGCLPPFPADVFMIPQYGYLTLNNGSQAVGRSSFYCLEYFPSQMLRTGNFEFSYFEDVPFHSSYAHSQSLDRLMNPLIDQYLYYLSRTQSTGGTAGTQQLLFSQAGPNNMSAQAKNWLPGPCYRQQRVSTTLSQNNNSNFAWTGATKYHLNGRDSLVNPGVAMATHDDEERFFPSSGVLMFGKQGAGDNVDYSSVMLTSEEEIKTTNPVATEQYGWADNLQQQNAAPIVGAVSQGALPGMVWQNRDVYLQGPIWAKIPHTDGNFHPSPLMGGFGLKHPPPQILIKNTPVPADPPTTFNQAKLASFITQYSTGQVSVEIEWELQKENSKRWNPEIQYTSNYCKSTNVDFAVNTEGTYSEPRPIGTRYLTRNL

SEQ ID NO: 741 - protein, 729 aa, synthetic construct
MAADGYLPDWLEDNLSEGIREWWDLKPGAPKPKANQQKQDNGRGLVLPGYKYLGPFNGLDKGEPVAADAAALEHDKAYDQQLQAGDNPYLRYHADAEFQERLQEDTSFGGNLGRAVFQAKKRVLEPLGLVESPVKTAPGKKRPVEPSPQRSPDSSTGIGKKGQQPAKKRLNFGQTGDSESVPDPQPIGEPPAGPSGLGSGTMAAGGGAPMADNNEGADGVGSSSGNWHCDSTWLGDRVITTSTRTWALPTYNNHLYKQISNGTSGGSTNDNTYFGYSTPWGYFDFNRFHCHFSPRDWQRLINNNWGFRPKRLNFLFNIQVKEVTQNEGTKTIANNLTSTIQVFGDSEYQLPYVLGSAHQGCLPPFPADVFMIPQYGYLTLNNGSQAVGRSSFYCLEYFPSQMLRTGNFEFSYFEDVPFHSSYAHSQSLDRLMNPLIDQYLYYLSRTQSTGGTAGTQQLLFSQAGPNNMSAQAKNWLPGPCYRQQRVSTTLSQNNNSNIAWTRATKYHLNGRDSLVNPGVAMATHDDEERFFPSSGVLMFGKQGAGDNVDYSSVMLTSEEEIKTTNPVATEQYGWADNLQQQNAAPIVGAVSQGALPGMVWQNRDVYLQGPIWAKIPHTDGNFHPSPLMGGFGLKHPPPQILIKNTPVPADPPTTFNQAKLASFITQYSTGQVSVEIEWELQKENSKRWNPEIQYTSNYYKSTNVDFAVNTEGTYSEPRPIGTRYLTRNL

SEQ ID NO: 742 - protein, 729 aa, synthetic construct
MAADGYLPDWLEDNLSEGIREWWDLKPGAPKPKANQQKQDNGRGLVLPGYKYLGPFNGLDKGEPVAADAAALEHDKAYDQQLQAGDNPYLRYHADAEFQERLQEDTSFGGNLGRAVFQAKKRVLEPLGLVESPVKTAPGKKRPVEPSPQRSPDSSTGIGKKGQQPAKKRLNFGQTGDSESVPDPQPIGEPPAGPSGLGSGTMAAGGGAPMADNNEGADGVGSSSGNWHCDSTWLGDRVITTSTRTWALPTYNNHLYKQISNGTSGGSTNDNTYFGYSTPWGYFDFNRFHCHFSPRDWQRLINNNWGFRPKRLNFLFNIQVKEVTQNEGTKTIANNLTSTIQVFGDSEYQLPYVLGSAHQGCLPPFPADVFMIPQYGYLTLNNGSQAVGRSSFYCLEYFPSQMLRTGNFEFSYFEDVPFHSSYAHSQSLDRLMNPLIDQYLYYLSRTQSTGGTAGTQQLLFSQAGPNNMSAQAKNWLPGPCYRQQRVSTTLSQNNNSNIAWTGATKYHLNGRDSLVNPGVAMATHDDEERFFPSSGVLMFGKQGAGDNVDYSSVMLTSEEEIKTTNPVATEQYGWADNLQQQNAAPIVGAVSQGALPGMVWQNRDVYLQGPIWAKIPHTDGNFHPSPLMGGFGLKHPPPQILIKNTPVPADPPTTFNQAKLASFITQYSTGQVSVEIEWELQKENSKRWNPEIQYTSNYCKSTNVDFAVNTEGTYSEPRPIGTRYLTRNL

SEQ ID NO: 743 - protein, 729 aa, synthetic construct
MAADGYLPDWLEDNLSEGIREWWDLKPGAPKPKANQQKQDNGRGLVLPGYKYLGPFNGLDKGEPVAADAAALEHDKAYDQQLQAGDNPYLRYHADAEFQERLQEDTSFGGNLGRAVFQAKKRVLEPLGLVESPVKTAPGKKRPVEPSPQRSPDSSTGIGKKGQQPAKKRLNFGQTGDSESVPDPQPIGEPPAGPSGLGSGTMAAGGGAPMADNNEGADGVGSSSGNWHCDSTWLGDRVITTSTRTWALPTYNNHLYKQISNGTSGGSTNDNTYFGYSTPWGYFDFNRFHCHFSPRDWQRLINNNWGFRPKRLNFLFNIQVKEVTQNEGTKTIANNLTSTIQVFGDSEYQLPYVLGSAHQGCLPPFPADVFMIPQYGYLTLNNGSQAVGRSSFYCLEYFPSQMLRTGNFEFSYFEDVPFHSSYAHSQSLDRLMNPLIDQYLYYLSRTQSTGGTAGTQQLLFSQAGPNNMSAQAKNWLPGPCYRQQRVSTTLSQNNNSNFAWTRATKYHLNGRDSLVNPGVAMATHDDEERFFPSSGVLMFGKQGAGDNVDYSSVMLTSEEEIKTTNPVATEQYGWADNLQQQNAAPIVGAVSQGALPGMVWQNRDVYLQGPIWAKIPHTDGNFHPSPLMGGFGLKHPPPQILIKNTPVPADPPTTFNQAKLASFITQYSTGQVSVEIEWELQKENSKRWNPEIQYTSNYCKSTNVDFAVNTEGTYSEPRPIGTRYLTRNL

SEQ ID NO: 744 - protein, 729 aa, synthetic construct
MAADGYLPDWLEDNLSEGIREWWDLKPGAPKPKANQQKQDNGRGLVLPGYKYLGPFNGLDKGEPVAADAAALEHDKAYDQQLQAGDNPYLRYHADAEFQERLQEDTSFGGNLGRAVFQAKKRVLEPLGLVESPVKTAPGKKRPVEPSPQRSPDSSTGIGKKGQQPAKKRLNFGQTGDSESVPDPQPIGEPPAGPSGLGSGTMAAGGGAPMADNNEGADGVGSSSGNWHCDSTWLGDRVITTSTRTWALPTYNNHLYKQISNGTSGGSTNDNTYFGYSTPWGYFDFNRFHCHFSPRDWQRLINNNWGFRPKRLNFLFNIQVKEVTQNEGTKTIANNLTSTIQVFGDSEYQLPYVLGSAHQGCLPPFPADVFMIPQYGYLTLNNGSQAVGRSSFYCLEYFPSQMLRTGNFEFSYFEDVPFHSSYAHSQSLDRLMNPLIDQYLYYLSRTQSTGGTAGTQQLLFSQAGPNNMSAQAKNWLPGPCYRQQRVSTTLSQNNNSNIAWTRATKYHLNGRDSLVNPGVAMATHDDEERFFPSSGVLMFGKQGAGDNVDYSSVMLTSEEEIKTTNPVATEQYGWADNLQQQNAAPIVGAVSQGALPGMVWQNRDVYLQGPIWAKIPHTDGNFHPSPLMGGFGLKHPPPQILIKNTPVPADPPTTFNQAKLASFITQYSTGQVSVEIEWELQKENSKRWNPEIQYTSNYCKSTNVDFAVNTEGTYSEPRPIGTRYLTRNL

SEQ ID NO: 745 - protein, 729 aa, synthetic construct
MAADGYLPDWLEDNLSEGIREWWDLKPGAPKPKANQQKQDNGRGLVLPGYKYLGPFNGLDKGEPVAADAAALEHDKAYDQQLQAGDNPYLRYHADAEFQERLQEDTSFGGNLGRAVFQAKKRVLEPLGLVESPVKTAPGKKRPVEPSPQRSPDSSTGIGKKGQQPAKKRLNFGQTGDSESVPDPQPIGEPPAGPSGLGSGTMAAGGGAPMADNNEGADGVGSSSGNWHCDSTWLGDRVITTSTRTWALPTYNNHLYKQISNGTSGGSTNDNTYFGYSTPWGYFDFNRFHCHFSPRDWQRLINNNWGFRPKRLNFLFNIQVKEVTQNEGTKTIANNLTSTIQVFTDSEYQLPYVLGSAHQGCLPPFPADVFMIPQYGYLTLNNGSQAVGRSSFYCLEYFPSQMLRTGNFEFSYFEDVPFHSSYAHSQSLDRLMNPLIDQYLYYLSRTQSTGGTAGTQQLLFSQAGPNNMSAQAKNWLPGPCYRQQRVSTTLSQNNNSNFAWTGATKYHLNGRDSLVNPGVAMATHDDEERFFPSSGVLMFGKQGAGDNVDYSSVMLTSEEEIKTTNPVATEQYGWADNLQQQNAAPIVGAVSQGALPGMVWQNRDVYLQGPIWAKIPHTDGNFHPSPLMGGFGLKHPPPQILIKNTPVPADPPTTFNQAKLASFITQYSTGQVSVEIEWELQKENSKRWNPEIQYTSNLYKSTNVDFAVNTEGTYSEPRPIGTRYLTRNL

SEQ ID NO: 746 - protein, 729 aa, synthetic construct
MAADGYLPDWLEDNLSEGIREWWDLKPGAPKPKANQQKQDNGRGLVLPGYKYLGPFNGLDKGEPVAADAAALEHDKAYDQQLQAGDNPYLRYHADAEFQERLQEDTSFGGNLGRAVFQAKKRVLEPLGLVESPVKTAPGKKRPVEPSPQRSPDSSTGIGKKGQQPAKKRLNFGQTGDSESVPDPQPIGEPPAGPSGLGSGTMAAGGGAPMADNNEGADGVGSSSGNWHCDSTWLGDRVITTSTRTWALPTYNNHLYKQISNGTSGGSTNDNTYFGYSTPWGYFDFNRFHCHFSPRDWQRLINNNWGFRPKRLNFLFNIQVKEVTQNEGTKTIANNLTSTIQVFTDSEYQLPYVLGSAHQGCLPPFPADVFMIPQYGYLTLNNGSQAVGRSSFYCLEYFPSQMLRTGNFEFSYFEDVPFHSSYAHSQSLDRLMNPLIDQYLYYLSRTQSTGGTAGTQQLLFSQAGPNNMSAQAKNWLPGPCYRQQRVSTTLSQNNNSNIAWTGATKYHLNGRDSLVNPGVAMATHDDEERFFPSSGVLMFGKQGAGDNVDYSSVMLTSEEEIKTTNPVATEQYGWADNLQQQNAAPIVGAVSQGALPGMVWQNRDVYLQGPIWAKIPHTDGNFHPSPLMGGFGLKHPPPQILIKNTPVPADPPTTFNQAKLASFITQYSTGQVSVEIEWELQKENSKRWNPEIQYTSNLYKSTNVDFAVNTEGTYSEPRPIGTRYLTRNL

SEQ ID NO: 747 - protein, 729 aa, synthetic construct
MAADGYLPDWLEDNLSEGIREWWDLKPGAPKPKANQQKQDNGRGLVLPGYKYLGPFNGLDKGEPVAADAAALEHDKAYDQQLQAGDNPYLRYHADAEFQERLQEDTSFGGNLGRAVFQAKKRVLEPLGLVESPVKTAPGKKRPVEPSPQRSPDSSTGIGKKGQQPAKKRLNFGQTGDSESVPDPQPIGEPPAGPSGLGSGTMAAGGGAPMADNNEGADGVGSSSGNWHCDSTWLGDRVITTSTRTWALPTYNNHLYKQISNGTSGGSTNDNTYFGYSTPWGYFDFNRFHCHFSPRDWQRLINNNWGFRPKRLNFLFNIQVKEVTQNEGTKTIANNLTSTIQVFTDSEYQLPYVLGSAHQGCLPPFPADVFMIPQYGYLTLNNGSQAVGRSSFYCLEYFPSQMLRTGNFEFSYFEDVPFHSSYAHSQSLDRLMNPLIDQYLYYLSRTQSTGGTAGTQQLLFSQAGPNNMSAQAKNWLPGPCYRQQRVSTTLSQNNNSNFAWTRATKYHLNGRDSLVNPGVAMATHDDEERFFPSSGVLMFGKQGAGDNVDYSSVMLTSEEEIKTTNPVATEQYGWADNLQQQNAAPIVGAVSQGALPGMVWQNRDVYLQGPIWAKIPHTDGNFHPSPLMGGFGLKHPPPQILIKNTPVPADPPTTFNQAKLASFITQYSTGQVSVEIEWELQKENSKRWNPEIQYTSNLYKSTNVDFAVNTEGTYSEPRPIGTRYLTRNL

SEQ ID NO: 748 - protein, 729 aa, synthetic construct
MAADGYLPDWLEDNLSEGIREWWDLKPGAPKPKANQQKQDNGRGLVLPGYKYLGPFNGLDKGEPVAADAAALEHDKAYDQQLQAGDNPYLRYHADAEFQERLQEDTSFGGNLGRAVFQAKKRVLEPLGLVESPVKTAPGKKRPVEPSPQRSPDSSTGIGKKGQQPAKKRLNFGQTGDSESVPDPQPIGEPPAGPSGLGSGTMAAGGGAPMADNNEGADGVGSSSGNWHCDSTWLGDRVITTSTRTWALPTYNNHLYKQISNGTSGGSTNDNTYFGYSTPWGYFDFNRFHCHFSPRDWQRLINNNWGFRPKRLNFLFNIQVKEVTQNEGTKTIANNLTSTIQVFTDSEYQLPYVLGSAHQGCLPPFPADVFMIPQYGYLTLNNGSQAVGRSSFYCLEYFPSQMLRTGNFEFSYFEDVPFHSSYAHSQSLDRLMNPLIDQYLYYLSRTQSTGGTAGTQQLLFSQAGPNNMSAQAKNWLPGPCYRQQRVSTTLSQNNNSNFAWTGATKYHLNGRDSLVNPGVAMATHDDEERFFPSSGVLMFGKQGAGDNVDYSSVMLTSEEEIKTTNPVATEQYGWADNLQQQNAAPIVGAVSQGALPGMVWQNRDVYLQGPIWAKIPHTDGNFHPSPLMGGFGLKHPPPQILIKNTPVPADPPTTFNQAKLASFITQYSTGQVSVEIEWELQKENSKRWNPEIQYTSNLCKSTNVDFAVNTEGTYSEPRPIGTRYLTRNL

SEQ ID NO: 749 - protein, 729 aa, synthetic construct
MAADGYLPDWLEDNLSEGIREWWDLKPGAPKPKANQQKQDNGRGLVLPGYKYLGPFNGLDKGEPVAADAAALEHDKAYDQQLQAGDNPYLRYHADAEFQERLQEDTSFGGNLGRAVFQAKKRVLEPLGLVESPVKTAPGKKRPVEPSPQRSPDSSTGIGKKGQQPAKKRLNFGQTGDSESVPDPQPIGEPPAGPSGLGSGTMAAGGGAPMADNNEGADGVGSSSGNWHCDSTWLGDRVITTSTRTWALPTYNNHLYKQISNGTSGGSTNDNTYFGYSTPWGYFDFNRFHCHFSPRDWQRLINNNWGFRPKRLNFLFNIQVKEVTQNEGTKTIANNLTSTIQVFTDSEYQLPYVLGSAHQGCLPPFPADVFMIPQYGYLTLNNGSQAVGRSSFYCLEYFPSQMLRTGNFEFSYFEDVPFHSSYAHSQSLDRLMNPLIDQYLYYLSRTQSTGGTAGTQQLLFSQAGPNNMSAQAKNWLPGPCYRQQRVSTTLSQNNNSNIAWTRATKYHLNGRDSLVNPGVAMATHDDEERFFPSSGVLMFGKQGAGDNVDYSSVMLTSEEEIKTTNPVATEQYGWADNLQQQNAAPIVGAVSQGALPGMVWQNRDVYLQGPIWAKIPHTDGNFHPSPLMGGFGLKHPPPQILIKNTPVPADPPTTFNQAKLASFITQYSTGQVSVEIEWELQKENSKRWNPEIQYTSNLYKSTNVDFAVNTEGTYSEPRPIGTRYLTRNL

SEQ ID NO: 750 - protein, 729 aa, synthetic construct
MAADGYLPDWLEDNLSEGIREWWDLKPGAPKPKANQQKQDNGRGLVLPGYKYLGPFNGLDKGEPVAADAAALEHDKAYDQQLQAGDNPYLRYHADAEFQERLQEDTSFGGNLGRAVFQAKKRVLEPLGLVESPVKTAPGKKRPVEPSPQRSPDSSTGIGKKGQQPAKKRLNFGQTGDSESVPDPQPIGEPPAGPSGLGSGTMAAGGGAPMADNNEGADGVGSSSGNWHCDSTWLGDRVITTSTRTWALPTYNNHLYKQISNGTSGGSTNDNTYFGYSTPWGYFDFNRFHCHFSPRDWQRLINNNWGFRPKRLNFLFNIQVKEVTQNEGTKTIANNLTSTIQVFTDSEYQLPYVLGSAHQGCLPPFPADVFMIPQYGYLTLNNGSQAVGRSSFYCLEYFPSQMLRTGNFEFSYFEDVPFHSSYAHSQSLDRLMNPLIDQYLYYLSRTQSTGGTAGTQQLLFSQAGPNNMSAQAKNWLPGPCYRQQRVSTTLSQNNNSNIAWTGATKYHLNGRDSLVNPGVAMATHDDEERFFPSSGVLMFGKQGAGDNVDYSSVMLTSEEEIKTTNPVATEQYGWADNLQQQNAAPIVGAVSQGALPGMVWQNRDVYLQGPIWAKIPHTDGNFHPSPLMGGFGLKHPPPQILIKNTPVPADPPTTFNQAKLASFITQYSTGQVSVEIEWELQKENSKRWNPEIQYTSNLCKSTNVDFAVNTEGTYSEPRPIGTRYLTRNL

SEQ ID NO: 751 - protein, 729 aa, synthetic construct
MAADGYLPDWLEDNLSEGIREWWDLKPGAPKPKANQQKQDNGRGLVLPGYKYLGPFNGLDKGEPVAADAAALEHDKAYDQQLQAGDNPYLRYHADAEFQERLQEDTSFGGNLGRAVFQAKKRVLEPLGLVESPVKTAPGKKRPVEPSPQRSPDSSTGIGKKGQQPAKKRLNFGQTGDSESVPDPQPIGEPPAGPSGLGSGTMAAGGGAPMADNNEGADGVGSSSGNWHCDSTWLGDRVITTSTRTWALPTYNNHLYKQISNGTSGGSTNDNTYFGYSTPWGYFDFNRFHCHFSPRDWQRLINNNWGFRPKRLNFLFNIQVKEVTQNEGTKTIANNLTSTIQVFTDSEYQLPYVLGSAHQGCLPPFPADVFMIPQYGYLTLNNGSQAVGRSSFYCLEYFPSQMLRTGNFEFSYFEDVPFHSSYAHSQSLDRLMNPLIDQYLYYLSRTQSTGGTAGTQQLLFSQAGPNNMSAQAKNWLPGPCYRQQRVSTTLSQNNNSNFAWTRATKYHLNGRDSLVNPGVAMATHDDEERFFPSSGVLMFGKQGAGDNVDYSSVMLTSEEEIKTTNPVATEQYGWADNLQQQNAAPIVGAVSQGALPGMVWQNRDVYLQGPIWAKIPHTDGNFHPSPLMGGFGLKHPPPQILIKNTPVPADPPTTFNQAKLASFITQYSTGQVSVEIEWELQKENSKRWNPEIQYTSNLCKSTNVDFAVNTEGTYSEPRPIGTRYLTRNL

SEQ ID NO: 752 - protein, 729 aa, synthetic construct
MAADGYLPDWLEDNLSEGIREWWDLKPGAPKPKANQQKQDNGRGLVLPGYKYLGPFNGLDKGEPVAADAAALEHDKAYDQQLQAGDNPYLRYHADAEFQERLQEDTSFGGNLGRAVFQAKKRVLEPLGLVESPVKTAPGKKRPVEPSPQRSPDSSTGIGKKGQQPAKKRLNFGQTGDSESVPDPQPIGEPPAGPSGLGSGTMAAGGGAPMADNNEGADGVGSSSGNWHCDSTWLGDRVITTSTRTWALPTYNNHLYKQISNGTSGGSTNDNTYFGYSTPWGYFDFNRFHCHFSPRDWQRLINNNWGFRPKRLNFLFNIQVKEVTQNEGTKTIANNLTSTIQVFTDSEYQLPYVLGSAHQGCLPPFPADVFMIPQYGYLTLNNGSQAVGRSSFYCLEYFPSQMLRTGNFEFSYFEDVPFHSSYAHSQSLDRLMNPLIDQYLYYLSRTQSTGGTAGTQQLLFSQAGPNNMSAQAKNWLPGPCYRQQRVSTTLSQNNNSNIAWTRATKYHLNGRDSLVNPGVAMATHDDEERFFPSSGVLMFGKQGAGDNVDYSSVMLTSEEEIKTTNPVATEQYGWADNLQQQNAAPIVGAVSQGALPGMVWQNRDVYLQGPIWAKIPHTDGNFHPSPLMGGFGLKHPPPQILIKNTPVPADPPTTFNQAKLASFITQYSTGQVSVEIEWELQKENSKRWNPEIQYTSNLCKSTNVDFAVNTEGTYSEPRPIGTRYLTRNL

SEQ ID NO: 753 - protein, 729 aa, synthetic construct
MAADGYLPDWLEDNLSEGIREWWDLKPGAPKPKANQQKQDNGRGLVLPGYKYLGPFNGLDKGEPVAADAAALEHDKAYDQQLQAGDNPYLRYHADAEFQERLQEDTSFGGNLGRAVFQAKKRVLEPLGLVESPVKTAPGKKRPVEPSPQRSPDSSTGIGKKGQQPAKKRLNFGQTGDSESVPDPQPIGEPPAGPSGLGSGTMAAGGGAPMADNNEGADGVGSSSGNWHCDSTWLGDRVITTSTRTWALPTYNNHLYKQISNGTSGGSTNDNTYFGYSTPWGYFDFNRFHCHFSPRDWQRLINNNWGFRPKRLNFLFNIQVKEVTQNEGTKTIANNLTSTIQVFGDSEYQLPYVLGSAHQGCLPPFPADVFMIPQYGYLTLNNGSQAVGRSSFYCLEYFPSQMLRTGNFEFSYFEDVPFHSSYAHSQSLDRLMNPLIDQYLYYLSRTQSTGGTAGTQQLLFSQAGPNNMSAQAKNWLPGPCYRQQRVSTTLSQNNNSNFAWTGATKYHLNGRDSLVNPGVAMATHDDEERFFPSSGVLMFGKQGAGDNVDYSSVMLTSEEEIKTTNPVATEQYGWADNLQQQNAAPIVGAVSQGALPGMVWQNRDVYLQGPIWAKIPHTDGNFHPSPLMGGFGLKHPPPQILIKNTPVPADPPTTFNQAKLASFITQYSTGQVSVEIEWELQKENSKRWNPEIQYTSNLYKSTNVDFAVNTEGTYSEPRPIGTRYLTRNL

SEQ ID NO: 754 - protein, 729 aa, synthetic construct
MAADGYLPDWLEDNLSEGIREWWDLKPGAPKPKANQQKQDNGRGLVLPGYKYLGPFNGLDKGEPVAADAAALEHDKAYDQQLQAGDNPYLRYHADAEFQERLQEDTSFGGNLGRAVFQAKKRVLEPLGLVESPVKTAPGKKRPVEPSPQRSPDSSTGIGKKGQQPAKKRLNFGQTGDSESVPDPQPIGEPPAGPSGLGSGTMAAGGGAPMADNNEGADGVGSSSGNWHCDSTWLGDRVITTSTRTWALPTYNNHLYKQISNGTSGGSTNDNTYFGYSTPWGYFDFNRFHCHFSPRDWQRLINNNWGFRPKRLNFLFNIQVKEVTQNEGTKTIANNLTSTIQVFGDSEYQLPYVLGSAHQGCLPPFPADVFMIPQYGYLTLNNGSQAVGRSSFYCLEYFPSQMLRTGNFEFSYFEDVPFHSSYAHSQSLDRLMNPLIDQYLYYLSRTQSTGGTAGTQQLLFSQAGPNNMSAQAKNWLPGPCYRQQRVSTTLSQNNNSNIAWTGATKYHLNGRDSLVNPGVAMATHDDEERFFPSSGVLMFGKQGAGDNVDYSSVMLTSEEEIKTTNPVATEQYGWADNLQQQNAAPIVGAVSQGALPGMVWQNRDVYLQGPIWAKIPHTDGNFHPSPLMGGFGLKHPPPQILIKNTPVPADPPTTFNQAKLASFITQYSTGQVSVEIEWELQKENSKRWNPEIQYTSNLYKSTNVDFAVNTEGTYSEPRPIGTRYLTRNL

SEQ ID NO: 755 - protein, 729 aa, synthetic construct
MAADGYLPDWLEDNLSEGIREWWDLKPGAPKPKANQQKQDNGRGLVLPGYKYLGPFNGLDKGEPVAADAAALEHDKAYDQQLQAGDNPYLRYHADAEFQERLQEDTSFGGNLGRAVFQAKKRVLEPLGLVESPVKTAPGKKRPVEPSPQRSPDSSTGIGKKGQQPAKKRLNFGQTGDSESVPDPQPIGEPPAGPSGLGSGTMAAGGGAPMADNNEGADGVGSSSGNWHCDSTWLGDRVITTSTRTWALPTYNNHLYKQISNGTSGGSTNDNTYFGYSTPWGYFDFNRFHCHFSPRDWQRLINNNWGFRPKRLNFLFNIQVKEVTQNEGTKTIANNLTSTIQVFGDSEYQLPYVLGSAHQGCLPPFPADVFMIPQYGYLTLNNGSQAVGRSSFYCLEYFPSQMLRTGNFEFSYFEDVPFHSSYAHSQSLDRLMNPLIDQYLYYLSRTQSTGGTAGTQQLLFSQAGPNNMSAQAKNWLPGPCYRQQRVSTTLSQNNNSNFAWTRATKYHLNGRDSLVNPGVAMATHDDEERFFPSSGVLMFGKQGAGDNVDYSSVMLTSEEEIKTTNPVATEQYGWADNLQQQNAAPIVGAVSQGALPGMVWQNRDVYLQGPIWAKIPHTDGNFHPSPLMGGFGLKHPPPQILIKNTPVPADPPTTFNQAKLASFITQYSTGQVSVEIEWELQKENSKRWNPEIQYTSNLYKSTNVDFAVNTEGTYSEPRPIGTRYLTRNL

SEQ ID NO: 756 - protein, 729 aa, synthetic construct
MAADGYLPDWLEDNLSEGIREWWDLKPGAPKPKANQQKQDNGRGLVLPGYKYLGPFNGLDKGEPVAADAAALEHDKAYDQQLQAGDNPYLRYHADAEFQERLQEDTSFGGNLGRAVFQAKKRVLEPLGLVESPVKTAPGKKRPVEPSPQRSPDSSTGIGKKGQQPAKKRLNFGQTGDSESVPDPQPIGEPPAGPSGLGSGTMAAGGGAPMADNNEGADGVGSSSGNWHCDSTWLGDRVITTSTRTWALPTYNNHLYKQISNGTSGGSTNDNTYFGYSTPWGYFDFNRFHCHFSPRDWQRLINNNWGFRPKRLNFLFNIQVKEVTQNEGTKTIANNLTSTIQVFGDSEYQLPYVLGSAHQGCLPPFPADVFMIPQYGYLTLNNGSQAVGRSSFYCLEYFPSQMLRTGNFEFSYFEDVPFHSSYAHSQSLDRLMNPLIDQYLYYLSRTQSTGGTAGTQQLLFSQAGPNNMSAQAKNWLPGPCYRQQRVSTTLSQNNNSNFAWTGATKYHLNGRDSLVNPGVAMATHDDEERFFPSSGVLMFGKQGAGDNVDYSSVMLTSEEEIKTTNPVATEQYGWADNLQQQNAAPIVGAVSQGALPGMVWQNRDVYLQGPIWAKIPHTDGNFHPSPLMGGFGLKHPPPQILIKNTPVPADPPTTFNQAKLASFITQYSTGQVSVEIEWELQKENSKRWNPEIQYTSNLCKSTNVDFAVNTEGTYSEPRPIGTRYLTRNL

SEQ ID NO: 757 - protein, 729 aa, synthetic construct
MAADGYLPDWLEDNLSEGIREWWDLKPGAPKPKANQQKQDNGRGLVLPGYKYLGPFNGLDKGEPVAADAAALEHDKAYDQQLQAGDNPYLRYHADAEFQERLQEDTSFGGNLGRAVFQAKKRVLEPLGLVESPVKTAPGKKRPVEPSPQRSPDSSTGIGKKGQQPAKKRLNFGQTGDSESVPDPQPIGEPPAGPSGLGSGTMAAGGGAPMADNNEGADGVGSSSGNWHCDSTWLGDRVITTSTRTWALPTYNNHLYKQISNGTSGGSTNDNTYFGYSTPWGYFDFNRFHCHFSPRDWQRLINNNWGFRPKRLNFLFNIQVKEVTQNEGTKTIANNLTSTIQVFGDSEYQLPYVLGSAHQGCLPPFPADVFMIPQYGYLTLNNGSQAVGRSSFYCLEYFPSQMLRTGNFEFSYFEDVPFHSSYAHSQSLDRLMNPLIDQYLYYLSRTQSTGGTAGTQQLLFSQAGPNNMSAQAKNWLPGPCYRQQRVSTTLSQNNNSNIAWTRATKYHLNGRDSLVNPGVAMATHDDEERFFPSSGVLMFGKQGAGDNVDYSSVMLTSEEEIKTTNPVATEQYGWADNLQQQNAAPIVGAVSQGALPGMVWQNRDVYLQGPIWAKIPHTDGNFHPSPLMGGFGLKHPPPQILIKNTPVPADPPTTFNQAKLASFITQYSTGQVSVEIEWELQKENSKRWNPEIQYTSNLYKSTNVDFAVNTEGTYSEPRPIGTRYLTRNL

SEQ ID NO: 758 - protein, 729 aa, synthetic construct
MAADGYLPDWLEDNLSEGIREWWDLKPGAPKPKANQQKQDNGRGLVLPGYKYLGPFNGLDKGEPVAADAAALEHDKAYDQQLQAGDNPYLRYHADAEFQERLQEDTSFGGNLGRAVFQAKKRVLEPLGLVESPVKTAPGKKRPVEPSPQRSPDSSTGIGKKGQQPAKKRLNFGQTGDSESVPDPQPIGEPPAGPSGLGSGTMAAGGGAPMADNNEGADGVGSSSGNWHCDSTWLGDRVITTSTRTWALPTYNNHLYKQISNGTSGGSTNDNTYFGYSTPWGYFDFNRFHCHFSPRDWQRLINNNWGFRPKRLNFLFNIQVKEVTQNEGTKTIANNLTSTIQVFGDSEYQLPYVLGSAHQGCLPPFPADVFMIPQYGYLTLNNGSQAVGRSSFYCLEYFPSQMLRTGNFEFSYFEDVPFHSSYAHSQSLDRLMNPLIDQYLYYLSRTQSTGGTAGTQQLLFSQAGPNNMSAQAKNWLPGPCYRQQRVSTTLSQNNNSNIAWTGATKYHLNGRDSLVNPGVAMATHDDEERFFPSSGVLMFGKQGAGDNVDYSSVMLTSEEEIKTTNPVATEQYGWADNLQQQNAAPIVGAVSQGALPGMVWQNRDVYLQGPIWAKIPHTDGNFHPSPLMGGFGLKHPPPQILIKNTPVPADPPTTFNQAKLASFITQYSTGQVSVEIEWELQKENSKRWNPEIQYTSNLCKSTNVDFAVNTEGTYSEPRPIGTRYLTRNL

SEQ ID NO: 759 - protein, 729 aa, synthetic construct
MAADGYLPDWLEDNLSEGIREWWDLKPGAPKPKANQQKQDNGRGLVLPGYKYLGPFNGLDKGEPVAADAAALEHDKAYDQQLQAGDNPYLRYHADAEFQERLQEDTSFGGNLGRAVFQAKKRVLEPLGLVESPVKTAPGKKRPVEPSPQRSPDSSTGIGKKGQQPAKKRLNFGQTGDSESVPDPQPIGEPPAGPSGLGSGTMAAGGGAPMADNNEGADGVGSSSGNWHCDSTWLGDRVITTSTRTWALPTYNNHLYKQISNGTSGGSTNDNTYFGYSTPWGYFDFNRFHCHFSPRDWQRLINNNWGFRPKRLNFLFNIQVKEVTQNEGTKTIANNLTSTIQVFGDSEYQLPYVLGSAHQGCLPPFPADVFMIPQYGYLTLNNGSQAVGRSSFYCLEYFPSQMLRTGNFEFSYFEDVPFHSSYAHSQSLDRLMNPLIDQYLYYLSRTQSTGGTAGTQQLLFSQAGPNNMSAQAKNWLPGPCYRQQRVSTTLSQNNNSNFAWTRATKYHLNGRDSLVNPGVAMATHDDEERFFPSSGVLMFGKQGAGDNVDYSSVMLTSEEEIKTTNPVATEQYGWADNLQQQNAAPIVGAVSQGALPGMVWQNRDVYLQGPIWAKIPHTDGNFHPSPLMGGFGLKHPPPQILIKNTPVPADPPTTFNQAKLASFITQYSTGQVSVEIEWELQKENSKRWNPEIQYTSNLCKSTNVDFAVNTEGTYSEPRPIGTRYLTRNL

SEQ ID NO: 760 - protein, 729 aa, synthetic construct
MAADGYLPDWLEDNLSEGIREWWDLKPGAPKPKANQQKQDNGRGLVLPGYKYLGPFNGLDKGEPVAADAAALEHDKAYDQQLQAGDNPYLRYHADAEFQERLQEDTSFGGNLGRAVFQAKKRVLEPLGLVESPVKTAPGKKRPVEPSPQRSPDSSTGIGKKGQQPAKKRLNFGQTGDSESVPDPQPIGEPPAGPSGLGSGTMAAGGGAPMADNNEGADGVGSSSGNWHCDSTWLGDRVITTSTRTWALPTYNNHLYKQISNGTSGGSTNDNTYFGYSTPWGYFDFNRFHCHFSPRDWQRLINNNWGFRPKRLNFLFNIQVKEVTQNEGTKTIANNLTSTIQVFGDSEYQLPYVLGSAHQGCLPPFPADVFMIPQYGYLTLNNGSQAVGRSSFYCLEYFPSQMLRTGNFEFSYFEDVPFHSSYAHSQSLDRLMNPLIDQYLYYLSRTQSTGGTAGTQQLLFSQAGPNNMSAQAKNWLPGPCYRQQRVSTTLSQNNNSNIAWTRATKYHLNGRDSLVNPGVAMATHDDEERFFPSSGVLMFGKQGAGDNVDYSSVMLTSEEEIKTTNPVATEQYGWADNLQQQNAAPIVGAVSQGALPGMVWQNRDVYLQGPIWAKIPHTDGNFHPSPLMGGFGLKHPPPQILIKNTPVPADPPTTFNQAKLASFITQYSTGQVSVEIEWELQKENSKRWNPEIQYTSNLCKSTNVDFAVNTEGTYSEPRPIGTRYLTRNL

SEQ ID NO: 761 - protein, 729 aa, synthetic construct
MAADGYLPDWLEDNLSEGIREWWDLKPGAPKPKANQQKQDNGRGLVLPGYKYLGPFNGLDKGEPVAADAAALEHDKAYDQQLQAGDNPYLRYHADAEFQERLQEDTSFGGNLGRAVFQAKKRVLEPLGLVESPVKTAPGKKRPVEPSPQRSPDSSTGIGKKGQQPAKKRLNFGQTGDSESVPDPQPIGEPPAGPSGLGSGTMAAGGGAPMADNNEGADGVGSSSGNWHCDSTWLGDRVITTSTRTWALPTYNNHLYKQISNGTSGGSTNDNTYFGYSTPWGYFDFNRFHCHFSPRDWQRLINNNWGFRPKRLNFLFNIQVKEVTQNEGTKTIANNLTSTIQVFADSEYQLPYVLGSAHQGCLPPFPADVFMIPQYGYLTLNNGSQAVGRSSFYCLEYFPSQMLRTGNFEFSYFEDVPFHSSYAHSQSLDRLMNPLIDQYLYYLSRTQSTGGTAGTQQLLFSQAGPNNMSAQAKNWLPGPCYRQQRVSTTLSQNNNSNFAWTGATKYHLNGRDSLVNPGVAMATHDDEERFFPSSGVLMFGKQGAGDNVDYSSVMLTSEEEIKTTNPVATEQYGWADNLQQQNAAPIVGAVSQGALPGMVWQNRDVYLQGPIWAKIPHTDGNFHPSPLMGGFGLKHPPPQILIKNTPVPADPPTTFNQAKLASFITQYSTGQVSVEIEWELQKENSKRWNPEIQYTSNLYKSTNVDFAVNTEGTYSEPRPIGTRYLTRNL

SEQ ID NO: 762 - protein, 729 aa, synthetic construct
MAADGYLPDWLEDNLSEGIREWWDLKPGAPKPKANQQKQDNGRGLVLPGYKYLGPFNGLDKGEPVAADAAALEHDKAYDQQLQAGDNPYLRYHADAEFQERLQEDTSFGGNLGRAVFQAKKRVLEPLGLVESPVKTAPGKKRPVEPSPQRSPDSSTGIGKKGQQPAKKRLNFGQTGDSESVPDPQPIGEPPAGPSGLGSGTMAAGGGAPMADNNEGADGVGSSSGNWHCDSTWLGDRVITTSTRTWALPTYNNHLYKQISNGTSGGSTNDNTYFGYSTPWGYFDFNRFHCHFSPRDWQRLINNNWGFRPKRLNFLFNIQVKEVTQNEGTKTIANNLTSTIQVFADSEYQLPYVLGSAHQGCLPPFPADVFMIPQYGYLTLNNGSQAVGRSSFYCLEYFPSQMLRTGNFEFSYFEDVPFHSSYAHSQSLDRLMNPLIDQYLYYLSRTQSTGGTAGTQQLLFSQAGPNNMSAQAKNWLPGPCYRQQRVSTTLSQNNNSNIAWTGATKYHLNGRDSLVNPGVAMATHDDEERFFPSSGVLMFGKQGAGDNVDYSSVMLTSEEEIKTTNPVATEQYGWADNLQQQNAAPIVGAVSQGALPGMVWQNRDVYLQGPIWAKIPHTDGNFHPSPLMGGFGLKHPPPQILIKNTPVPADPPTTFNQAKLASFITQYSTGQVSVEIEWELQKENSKRWNPEIQYTSNLYKSTNVDFAVNTEGTYSEPRPIGTRYLTRNL

SEQ ID NO: 763 - protein, 729 aa, synthetic construct
MAADGYLPDWLEDNLSEGIREWWDLKPGAPKPKANQQKQDNGRGLVLPGYKYLGPFNGLDKGEPVAADAAALEHDKAYDQQLQAGDNPYLRYHADAEFQERLQEDTSFGGNLGRAVFQAKKRVLEPLGLVESPVKTAPGKKRPVEPSPQRSPDSSTGIGKKGQQPAKKRLNFGQTGDSESVPDPQPIGEPPAGPSGLGSGTMAAGGGAPMADNNEGADGVGSSSGNWHCDSTWLGDRVITTSTRTWALPTYNNHLYKQISNGTSGGSTNDNTYFGYSTPWGYFDFNRFHCHFSPRDWQRLINNNWGFRPKRLNFLFNIQVKEVTQNEGTKTIANNLTSTIQVFADSEYQLPYVLGSAHQGCLPPFPADVFMIPQYGYLTLNNGSQAVGRSSFYCLEYFPSQMLRTGNFEFSYFEDVPFHSSYAHSQSLDRLMNPLIDQYLYYLSRTQSTGGTAGTQQLLFSQAGPNNMSAQAKNWLPGPCYRQQRVSTTLSQNNNSNFAWTRATKYHLNGRDSLVNPGVAMATHDDEERFFPSSGVLMFGKQGAGDNVDYSSVMLTSEEEIKTTNPVATEQYGWADNLQQQNAAPIVGAVSQGALPGMVWQNRDVYLQGPIWAKIPHTDGNFHPSPLMGGFGLKHPPPQILIKNTPVPADPPTTFNQAKLASFITQYSTGQVSVEIEWELQKENSKRWNPEIQYTSNLYKSTNVDFAVNTEGTYSEPRPIGTRYLTRNL

SEQ ID NO: 764 - protein, 729 aa, synthetic construct
MAADGYLPDWLEDNLSEGIREWWDLKPGAPKPKANQQKQDNGRGLVLPGYKYLGPFNGLDKGEPVAADAAALEHDKAYDQQLQAGDNPYLRYHADAEFQERLQEDTSFGGNLGRAVFQAKKRVLEPLGLVESPVKTAPGKKRPVEPSPQRSPDSSTGIGKKGQQPAKKRLNFGQTGDSESVPDPQPIGEPPAGPSGLGSGTMAAGGGAPMADNNEGADGVGSSSGNWHCDSTWLGDRVITTSTRTWALPTYNNHLYKQISNGTSGGSTNDNTYFGYSTPWGYFDFNRFHCHFSPRDWQRLINNNWGFRPKRLNFLFNIQVKEVTQNEGTKTIANNLTSTIQVFADSEYQLPYVLGSAHQGCLPPFPADVFMIPQYGYLTLNNGSQAVGRSSFYCLEYFPSQMLRTGNFEFSYFEDVPFHSSYAHSQSLDRLMNPLIDQYLYYLSRTQSTGGTAGTQQLLFSQAGPNNMSAQAKNWLPGPCYRQQRVSTTLSQNNNSNFAWTGATKYHLNGRDSLVNPGVAMATHDDEERFFPSSGVLMFGKQGAGDNVDYSSVMLTSEEEIKTTNPVATEQYGWADNLQQQNAAPIVGAVSQGALPGMVWQNRDVYLQGPIWAKIPHTDGNFHPSPLMGGFGLKHPPPQILIKNTPVPADPPTTFNQAKLASFITQYSTGQVSVEIEWELQKENSKRWNPEIQYTSNLCKSTNVDFAVNTEGTYSEPRPIGTRYLTRNL

SEQ ID NO: 765 - protein, 729 aa, synthetic construct
MAADGYLPDWLEDNLSEGIREWWDLKPGAPKPKANQQKQDNGRGLVLPGYKYLGPFNGLDKGEPVAADAAALEHDKAYDQQLQAGDNPYLRYHADAEFQERLQEDTSFGGNLGRAVFQAKKRVLEPLGLVESPVKTAPGKKRPVEPSPQRSPDSSTGIGKKGQQPAKKRLNFGQTGDSESVPDPQPIGEPPAGPSGLGSGTMAAGGGAPMADNNEGADGVGSSSGNWHCDSTWLGDRVITTSTRTWALPTYNNHLYKQISNGTSGGSTNDNTYFGYSTPWGYFDFNRFHCHFSPRDWQRLINNNWGFRPKRLNFLFNIQVKEVTQNEGTKTIANNLTSTIQVFADSEYQLPYVLGSAHQGCLPPFPADVFMIPQYGYLTLNNGSQAVGRSSFYCLEYFPSQMLRTGNFEFSYFEDVPFHSSYAHSQSLDRLMNPLIDQYLYYLSRTQSTGGTAGTQQLLFSQAGPNNMSAQAKNWLPGPCYRQQRVSTTLSQNNNSNIAWTRATKYHLNGRDSLVNPGVAMATHDDEERFFPSSGVLMFGKQGAGDNVDYSSVMLTSEEEIKTTNPVATEQYGWADNLQQQNAAPIVGAVSQGALPGMVWQNRDVYLQGPIWAKIPHTDGNFHPSPLMGGFGLKHPPPQILIKNTPVPADPPTTFNQAKLASFITQYSTGQVSVEIEWELQKENSKRWNPEIQYTSNLYKSTNVDFAVNTEGTYSEPRPIGTRYLTRNL

SEQ ID NO: 766 - protein, 729 aa, synthetic construct
MAADGYLPDWLEDNLSEGIREWWDLKPGAPKPKANQQKQDNGRGLVLPGYKYLGPFNGLDKGEPVAADAAALEHDKAYDQQLQAGDNPYLRYHADAEFQERLQEDTSFGGNLGRAVFQAKKRVLEPLGLVESPVKTAPGKKRPVEPSPQRSPDSSTGIGKKGQQPAKKRLNFGQTGDSESVPDPQPIGEPPAGPSGLGSGTMAAGGGAPMADNNEGADGVGSSSGNWHCDSTWLGDRVITTSTRTWALPTYNNHLYKQISNGTSGGSTNDNTYFGYSTPWGYFDFNRFHCHFSPRDWQRLINNNWGFRPKRLNFLFNIQVKEVTQNEGTKTIANNLTSTIQVFADSEYQLPYVLGSAHQGCLPPFPADVFMIPQYGYLTLNNGSQAVGRSSFYCLEYFPSQMLRTGNFEFSYFEDVPFHSSYAHSQSLDRLMNPLIDQYLYYLSRTQSTGGTAGTQQLLFSQAGPNNMSAQAKNWLPGPCYRQQRVSTTLSQNNNSNIAWTGATKYHLNGRDSLVNPGVAMATHDDEERFFPSSGVLMFGKQGAGDNVDYSSVMLTSEEEIKTTNPVATEQYGWADNLQQQNAAPIVGAVSQGALPGMVWQNRDVYLQGPIWAKIPHTDGNFHPSPLMGGFGLKHPPPQILIKNTPVPADPPTTFNQAKLASFITQYSTGQVSVEIEWELQKENSKRWNPEIQYTSNLCKSTNVDFAVNTEGTYSEPRPIGTRYLTRNL

SEQ ID NO: 767 - protein, 729 aa, synthetic construct
MAADGYLPDWLEDNLSEGIREWWDLKPGAPKPKANQQKQDNGRGLVLPGYKYLGPFNGLDKGEPVAADAAALEHDKAYDQQLQAGDNPYLRYHADAEFQERLQEDTSFGGNLGRAVFQAKKRVLEPLGLVESPVKTAPGKKRPVEPSPQRSPDSSTGIGKKGQQPAKKRLNFGQTGDSESVPDPQPIGEPPAGPSGLGSGTMAAGGGAPMADNNEGADGVGSSSGNWHCDSTWLGDRVITTSTRTWALPTYNNHLYKQISNGTSGGSTNDNTYFGYSTPWGYFDFNRFHCHFSPRDWQRLINNNWGFRPKRLNFLFNIQVKEVTQNEGTKTIANNLTSTIQVFADSEYQLPYVLGSAHQGCLPPFPADVFMIPQYGYLTLNNGSQAVGRSSFYCLEYFPSQMLRTGNFEFSYFEDVPFHSSYAHSQSLDRLMNPLIDQYLYYLSRTQSTGGTAGTQQLLFSQAGPNNMSAQAKNWLPGPCYRQQRVSTTLSQNNNSNFAWTRATKYHLNGRDSLVNPGVAMATHDDEERFFPSSGVLMFGKQGAGDNVDYSSVMLTSEEEIKTTNPVATEQYGWADNLQQQNAAPIVGAVSQGALPGMVWQNRDVYLQGPIWAKIPHTDGNFHPSPLMGGFGLKHPPPQILIKNTPVPADPPTTFNQAKLASFITQYSTGQVSVEIEWELQKENSKRWNPEIQYTSNLCKSTNVDFAVNTEGTYSEPRPIGTRYLTRNL

SEQ ID NO: 768 - protein, 729 aa, synthetic construct
MAADGYLPDWLEDNLSEGIREWWDLKPGAPKPKANQQKQDNGRGLVLPGYKYLGPFNGLDKGEPVAADAAALEHDKAYDQQLQAGDNPYLRYHADAEFQERLQEDTSFGGNLGRAVFQAKKRVLEPLGLVESPVKTAPGKKRPVEPSPQRSPDSSTGIGKKGQQPAKKRLNFGQTGDSESVPDPQPIGEPPAGPSGLGSGTMAAGGGAPMADNNEGADGVGSSSGNWHCDSTWLGDRVITTSTRTWALPTYNNHLYKQISNGTSGGSTNDNTYFGYSTPWGYFDFNRFHCHFSPRDWQRLINNNWGFRPKRLNFLFNIQVKEVTQNEGTKTIANNLTSTIQVFADSEYQLPYVLGSAHQGCLPPFPADVFMIPQYGYLTLNNGSQAVGRSSFYCLEYFPSQMLRTGNFEFSYFEDVPFHSSYAHSQSLDRLMNPLIDQYLYYLSRTQSTGGTAGTQQLLFSQAGPNNMSAQAKNWLPGPCYRQQRVSTTLSQNNNSNIAWTRATKYHLNGRDSLVNPGVAMATHDDEERFFPSSGVLMFGKQGAGDNVDYSSVMLTSEEEIKTTNPVATEQYGWADNLQQQNAAPIVGAVSQGALPGMVWQNRDVYLQGPIWAKIPHTDGNFHPSPLMGGFGLKHPPPQILIKNTPVPADPPTTFNQAKLASFITQYSTGQVSVEIEWELQKENSKRWNPEIQYTSNLCKSTNVDFAVNTEGTYSEPRPIGTRYLTRNL

SEQ ID NO: 769 - protein, 737 aa, synthetic construct
MAADGYLPDWLEDTLSEGIRQWWKLKPGPPPPKPAERHKDDSRGLVLPGYKYLGPFNGLDKGEPVNEADAAALEHDKAYDRQLDSGDNPYLKYNHADAEFQERLKEDTSFGGNLGRAVFQAKKRLLEPLGLVEEAAKTAPGKKRPVEHSPVEPDSSSGTGKAGQQPARKRLNFGQTGDADSVPDPQPIGEPPAAPSGVGSLTMAAGGGAPMADNNEGADGVGNSSGNWHCDSTWMGDRVITTSTRTWALPTYNNHLYKQISNSTSGGSSNDNAYFGYSTPWGYFDFNRFHCHFSPRDWQRLINNNWGFRPKRLSFKLFNIQVKEVTQNEGTKTIANNLTSTIQVFGDSEYQLPYVLGSAHQGCLPPFPADVFMIPQYGYLTLNNGSQAVGRSSFYCLEYFPSQMLRTGNNFQFTYTFEDVPFHSSYAHSQSLDRLMNPLIDQYLYYLSRTQTTGGTTNTQTLGFSQGGPNTMANQAKNWLPGPCYRQQRVSKTSADNNNSEYSWTGATKYHLNGRDSLVNPGPAMASHKDDEEKFFPQSGVLIFGKQGSEKTNVDIEKVMITDEEEIRTTNPVATEQYGSVSTNLQRGNRQAATADVNTQGVLPGMVWQDRDVYLQGPIWAKIPHTDGHFHPSPLMGGFGLKHPPPQILIKNTPVPADPPTTFNQSKLNSFITQYSTGQVSVEIEWELQKENSKRWNPEIQYTSNYYKSTSVDFAVNTEGVYSEPRPIGTRYLTRNL

SEQ ID NO: 770 - protein, 737 aa, synthetic construct
MAADGYLPDWLEDTLSEGIRQWWKLKPGPPPPKPAERHKDDSRGLVLPGYKYLGPFNGLDKGEPVNEADAAALEHDKAYDRQLDSGDNPYLKYNHADAEFQERLKEDTSFGGNLGRAVFQAKKRLLEPLGLVEEAAKTAPGKKRPVEHSPVEPDSSSGTGKAGQQPARKRLNFGQTGDADSVPDPQPIGEPPAAPSGVGSLTMAAGGGAPMADNNEGADGVGNSSGNWHCDSTWMGDRVITTSTRTWALPTYNNHLYKQISNSTSGGSSNDNAYFGYSTPWGYFDFNRFHCHFSPRDWQRLINNNWGFRPKRLSFKLFNIQVKEVTQNEGTKTIANNLTSTIQVFGDSEYQLPYVLGSAHQGCLPPFPADVFMIPQYGYLTLNNGSQAVGRSSFYCLEYFPSQMLRTGNNFQFTYTFEDVPFHSSYAHSQSLDRLMNPLIDQYLYYLSRTQTTGGTTNTQTLGFSQGGPNTMANQAKNWLPGPCYRQQRVSKTSADNNNSEISWTGATKYHLNGRDSLVNPGPAMASHKDDEEKFFPQSGVLIFGKQGSEKTNVDIEKVMITDEEEIRTTNPVATEQYGSVSTNLQRGNRQAATADVNTQGVLPGMVWQDRDVYLQGPIWAKIPHTDGHFHPSPLMGGFGLKHPPPQILIKNTPVPADPPTTFNQSKLNSFITQYSTGQVSVEIEWELQKENSKRWNPEIQYTSNYYKSTSVDFAVNTEGVYSEPRPIGTRYLTRNL

SEQ ID NO: 771 - protein, 737 aa, synthetic construct
MAADGYLPDWLEDTLSEGIRQWWKLKPGPPPPKPAERHKDDSRGLVLPGYKYLGPFNGLDKGEPVNEADAAALEHDKAYDRQLDSGDNPYLKYNHADAEFQERLKEDTSFGGNLGRAVFQAKKRLLEPLGLVEEAAKTAPGKKRPVEHSPVEPDSSSGTGKAGQQPARKRLNFGQTGDADSVPDPQPIGEPPAAPSGVGSLTMAAGGGAPMADNNEGADGVGNSSGNWHCDSTWMGDRVITTSTRTWALPTYNNHLYKQISNSTSGGSSNDNAYFGYSTPWGYFDFNRFHCHFSPRDWQRLINNNWGFRPKRLSFKLFNIQVKEVTQNEGTKTIANNLTSTIQVFGDSEYQLPYVLGSAHQGCLPPFPADVFMIPQYGYLTLNNGSQAVGRSSFYCLEYFPSQMLRTGNNFQFTYTFEDVPFHSSYAHSQSLDRLMNPLIDQYLYYLSRTQTTGGTTNTQTLGFSQGGPNTMANQAKNWLPGPCYRQQRVSKTSADNNNSEYSWTRATKYHLNGRDSLVNPGPAMASHKDDEEKFFPQSGVLIFGKQGSEKTNVDIEKVMITDEEEIRTTNPVATEQYGSVSTNLQRGNRQAATADVNTQGVLPGMVWQDRDVYLQGPIWAKIPHTDGHFHPSPLMGGFGLKHPPPQILIKNTPVPADPPTTFNQSKLNSFITQYSTGQVSVEIEWELQKENSKRWNPEIQYTSNYYKSTSVDFAVNTEGVYSEPRPIGTRYLTRNL

SEQ ID NO: 772 - protein, 737 aa, synthetic construct
MAADGYLPDWLEDTLSEGIRQWWKLKPGPPPPKPAERHKDDSRGLVLPGYKYLGPFNGLDKGEPVNEADAAALEHDKAYDRQLDSGDNPYLKYNHADAEFQERLKEDTSFGGNLGRAVFQAKKRLLEPLGLVEEAAKTAPGKKRPVEHSPVEPDSSSGTGKAGQQPARKRLNFGQTGDADSVPDPQPIGEPPAAPSGVGSLTMAAGGGAPMADNNEGADGVGNSSGNWHCDSTWMGDRVITTSTRTWALPTYNNHLYKQISNSTSGGSSNDNAYFGYSTPWGYFDFNRFHCHFSPRDWQRLINNNWGFRPKRLSFKLFNIQVKEVTQNEGTKTIANNLTSTIQVFGDSEYQLPYVLGSAHQGCLPPFPADVFMIPQYGYLTLNNGSQAVGRSSFYCLEYFPSQMLRTGNNFQFTYTFEDVPFHSSYAHSQSLDRLMNPLIDQYLYYLSRTQTTGGTTNTQTLGFSQGGPNTMANQAKNWLPGPCYRQQRVSKTSADNNNSEYSWTGATKYHLNGRDSLVNPGPAMASHKDDEEKFFPQSGVLIFGKQGSEKTNVDIEKVMITDEEEIRTTNPVATEQYGSVSTNLQRGNRQAATADVNTQGVLPGMVWQDRDVYLQGPIWAKIPHTDGHFHPSPLMGGFGLKHPPPQILIKNTPVPADPPTTFNQSKLNSFITQYSTGQVSVEIEWELQKENSKRWNPEIQYTSNYCKSTSVDFAVNTEGVYSEPRPIGTRYLTRNL

SEQ ID NO: 773 - protein, 737 aa, synthetic construct
MAADGYLPDWLEDTLSEGIRQWWKLKPGPPPPKPAERHKDDSRGLVLPGYKYLGPFNGLDKGEPVNEADAAALEHDKAYDRQLDSGDNPYLKYNHADAEFQERLKEDTSFGGNLGRAVFQAKKRLLEPLGLVEEAAKTAPGKKRPVEHSPVEPDSSSGTGKAGQQPARKRLNFGQTGDADSVPDPQPIGEPPAAPSGVGSLTMAAGGGAPMADNNEGADGVGNSSGNWHCDSTWMGDRVITTSTRTWALPTYNNHLYKQISNSTSGGSSNDNAYFGYSTPWGYFDFNRFHCHFSPRDWQRLINNNWGFRPKRLSFKLFNIQVKEVTQNEGTKTIANNLTSTIQVFGDSEYQLPYVLGSAHQGCLPPFPADVFMIPQYGYLTLNNGSQAVGRSSFYCLEYFPSQMLRTGNNFQFTYTFEDVPFHSSYAHSQSLDRLMNPLIDQYLYYLSRTQTTGGTTNTQTLGFSQGGPNTMANQAKNWLPGPCYRQQRVSKTSADNNNSEISWTRATKYHLNGRDSLVNPGPAMASHKDDEEKFFPQSGVLIFGKQGSEKTNVDIEKVMITDEEEIRTTNPVATEQYGSVSTNLQRGNRQAATADVNTQGVLPGMVWQDRDVYLQGPIWAKIPHTDGHFHPSPLMGGFGLKHPPPQILIKNTPVPADPPTTFNQSKLNSFITQYSTGQVSVEIEWELQKENSKRWNPEIQYTSNYYKSTSVDFAVNTEGVYSEPRPIGTRYLTRNL

SEQ ID NO: 774 - protein, 737 aa, synthetic construct
MAADGYLPDWLEDTLSEGIRQWWKLKPGPPPPKPAERHKDDSRGLVLPGYKYLGPFNGLDKGEPVNEADAAALEHDKAYDRQLDSGDNPYLKYNHADAEFQERLKEDTSFGGNLGRAVFQAKKRLLEPLGLVEEAAKTAPGKKRPVEHSPVEPDSSSGTGKAGQQPARKRLNFGQTGDADSVPDPQPIGEPPAAPSGVGSLTMAAGGGAPMADNNEGADGVGNSSGNWHCDSTWMGDRVITTSTRTWALPTYNNHLYKQISNSTSGGSSNDNAYFGYSTPWGYFDFNRFHCHFSPRDWQRLINNNWGFRPKRLSFKLFNIQVKEVTQNEGTKTIANNLTSTIQVFGDSEYQLPYVLGSAHQGCLPPFPADVFMIPQYGYLTLNNGSQAVGRSSFYCLEYFPSQMLRTGNNFQFTYTFEDVPFHSSYAHSQSLDRLMNPLIDQYLYYLSRTQTTGGTTNTQTLGFSQGGPNTMANQAKNWLPGPCYRQQRVSKTSADNNNSEYSWTRATKYHLNGRDSLVNPGPAMASHKDDEEKFFPQSGVLIFGKQGSEKTNVDIEKVMITDEEEIRTTNPVATEQYGSVSTNLQRGNRQAATADVNTQGVLPGMVWQDRDVYLQGPIWAKIPHTDGHFHPSPLMGGFGLKHPPPQILIKNTPVPADPPTTFNQSKLNSFITQYSTGQVSVEIEWELQKENSKRWNPEIQYTSNYCKSTSVDFAVNTEGVYSEPRPIGTRYLTRNL

SEQ ID NO: 775 - protein, 737 aa, synthetic construct
MAADGYLPDWLEDTLSEGIRQWWKLKPGPPPPKPAERHKDDSRGLVLPGYKYLGPFNGLDKGEPVNEADAAALEHDKAYDRQLDSGDNPYLKYNHADAEFQERLKEDTSFGGNLGRAVFQAKKRLLEPLGLVEEAAKTAPGKKRPVEHSPVEPDSSSGTGKAGQQPARKRLNFGQTGDADSVPDPQPIGEPPAAPSGVGSLTMAAGGGAPMADNNEGADGVGNSSGNWHCDSTWMGDRVITTSTRTWALPTYNNHLYKQISNSTSGGSSNDNAYFGYSTPWGYFDFNRFHCHFSPRDWQRLINNNWGFRPKRLSFKLFNIQVKEVTQNEGTKTIANNLTSTIQVFGDSEYQLPYVLGSAHQGCLPPFPADVFMIPQYGYLTLNNGSQAVGRSSFYCLEYFPSQMLRTGNNFQFTYTFEDVPFHSSYAHSQSLDRLMNPLIDQYLYYLSRTQTTGGTTNTQTLGFSQGGPNTMANQAKNWLPGPCYRQQRVSKTSADNNNSEISWTGATKYHLNGRDSLVNPGPAMASHKDDEEKFFPQSGVLIFGKQGSEKTNVDIEKVMITDEEEIRTTNPVATEQYGSVSTNLQRGNRQAATADVNTQGVLPGMVWQDRDVYLQGPIWAKIPHTDGHFHPSPLMGGFGLKHPPPQILIKNTPVPADPPTTFNQSKLNSFITQYSTGQVSVEIEWELQKENSKRWNPEIQYTSNYCKSTSVDFAVNTEGVYSEPRPIGTRYLTRNL

SEQ ID NO: 776 - protein, 737 aa, synthetic construct
MAADGYLPDWLEDTLSEGIRQWWKLKPGPPPPKPAERHKDDSRGLVLPGYKYLGPFNGLDKGEPVNEADAAALEHDKAYDRQLDSGDNPYLKYNHADAEFQERLKEDTSFGGNLGRAVFQAKKRLLEPLGLVEEAAKTAPGKKRPVEHSPVEPDSSSGTGKAGQQPARKRLNFGQTGDADSVPDPQPIGEPPAAPSGVGSLTMAAGGGAPMADNNEGADGVGNSSGNWHCDSTWMGDRVITTSTRTWALPTYNNHLYKQISNSTSGGSSNDNAYFGYSTPWGYFDFNRFHCHFSPRDWQRLINNNWGFRPKRLSFKLFNIQVKEVTQNEGTKTIANNLTSTIQVFGDSEYQLPYVLGSAHQGCLPPFPADVFMIPQYGYLTLNNGSQAVGRSSFYCLEYFPSQMLRTGNNFQFTYTFEDVPFHSSYAHSQSLDRLMNPLIDQYLYYLSRTQTTGGTTNTQTLGFSQGGPNTMANQAKNWLPGPCYRQQRVSKTSADNNNSEISWTRATKYHLNGRDSLVNPGPAMASHKDDEEKFFPQSGVLIFGKQGSEKTNVDIEKVMITDEEEIRTTNPVATEQYGSVSTNLQRGNRQAATADVNTQGVLPGMVWQDRDVYLQGPIWAKIPHTDGHFHPSPLMGGFGLKHPPPQILIKNTPVPADPPTTFNQSKLNSFITQYSTGQVSVEIEWELQKENSKRWNPEIQYTSNYCKSTSVDFAVNTEGVYSEPRPIGTRYLTRNL

SEQ ID NO: 777 - protein, 737 aa, synthetic construct
MAADGYLPDWLEDTLSEGIRQWWKLKPGPPPPKPAERHKDDSRGLVLPGYKYLGPFNGLDKGEPVNEADAAALEHDKAYDRQLDSGDNPYLKYNHADAEFQERLKEDTSFGGNLGRAVFQAKKRLLEPLGLVEEAAKTAPGKKRPVEHSPVEPDSSSGTGKAGQQPARKRLNFGQTGDADSVPDPQPIGEPPAAPSGVGSLTMAAGGGAPMADNNEGADGVGNSSGNWHCDSTWMGDRVITTSTRTWALPTYNNHLYKQISNSTSGGSSNDNAYFGYSTPWGYFDFNRFHCHFSPRDWQRLINNNWGFRPKRLSFKLFNIQVKEVTQNEGTKTIANNLTSTIQVFTDSEYQLPYVLGSAHQGCLPPFPADVFMIPQYGYLTLNNGSQAVGRSSFYCLEYFPSQMLRTGNNFQFTYTFEDVPFHSSYAHSQSLDRLMNPLIDQYLYYLSRTQTTGGTTNTQTLGFSQGGPNTMANQAKNWLPGPCYRQQRVSKTSADNNNSEYSWTGATKYHLNGRDSLVNPGPAMASHKDDEEKFFPQSGVLIFGKQGSEKTNVDIEKVMITDEEEIRTTNPVATEQYGSVSTNLQRGNRQAATADVNTQGVLPGMVWQDRDVYLQGPIWAKIPHTDGHFHPSPLMGGFGLKHPPPQILIKNTPVPADPPTTFNQSKLNSFITQYSTGQVSVEIEWELQKENSKRWNPEIQYTSNLYKSTSVDFAVNTEGVYSEPRPIGTRYLTRNL

SEQ ID NO: 778 - protein, 737 aa, synthetic construct
MAADGYLPDWLEDTLSEGIRQWWKLKPGPPPPKPAERHKDDSRGLVLPGYKYLGPFNGLDKGEPVNEADAAALEHDKAYDRQLDSGDNPYLKYNHADAEFQERLKEDTSFGGNLGRAVFQAKKRLLEPLGLVEEAAKTAPGKKRPVEHSPVEPDSSSGTGKAGQQPARKRLNFGQTGDADSVPDPQPIGEPPAAPSGVGSLTMAAGGGAPMADNNEGADGVGNSSGNWHCDSTWMGDRVITTSTRTWALPTYNNHLYKQISNSTSGGSSNDNAYFGYSTPWGYFDFNRFHCHFSPRDWQRLINNNWGFRPKRLSFKLFNIQVKEVTQNEGTKTIANNLTSTIQVFTDSEYQLPYVLGSAHQGCLPPFPADVFMIPQYGYLTLNNGSQAVGRSSFYCLEYFPSQMLRTGNNFQFTYTFEDVPFHSSYAHSQSLDRLMNPLIDQYLYYLSRTQTTGGTTNTQTLGFSQGGPNTMANQAKNWLPGPCYRQQRVSKTSADNNNSEISWTGATKYHLNGRDSLVNPGPAMASHKDDEEKFFPQSGVLIFGKQGSEKTNVDIEKVMITDEEEIRTTNPVATEQYGSVSTNLQRGNRQAATADVNTQGVLPGMVWQDRDVYLQGPIWAKIPHTDGHFHPSPLMGGFGLKHPPPQILIKNTPVPADPPTTFNQSKLNSFITQYSTGQVSVEIEWELQKENSKRWNPEIQYTSNLYKSTSVDFAVNTEGVYSEPRPIGTRYLTRNL

SEQ ID NO: 779 - protein, 737 aa, synthetic construct
MAADGYLPDWLEDTLSEGIRQWWKLKPGPPPPKPAERHKDDSRGLVLPGYKYLGPFNGLDKGEPVNEADAAALEHDKAYDRQLDSGDNPYLKYNHADAEFQERLKEDTSFGGNLGRAVFQAKKRLLEPLGLVEEAAKTAPGKKRPVEHSPVEPDSSSGTGKAGQQPARKRLNFGQTGDADSVPDPQPIGEPPAAPSGVGSLTMAAGGGAPMADNNEGADGVGNSSGNWHCDSTWMGDRVITTSTRTWALPTYNNHLYKQISNSTSGGSSNDNAYFGYSTPWGYFDFNRFHCHFSPRDWQRLINNNWGFRPKRLSFKLFNIQVKEVTQNEGTKTIANNLTSTIQVFTDSEYQLPYVLGSAHQGCLPPFPADVFMIPQYGYLTLNNGSQAVGRSSFYCLEYFPSQMLRTGNNFQFTYTFEDVPFHSSYAHSQSLDRLMNPLIDQYLYYLSRTQTTGGTTNTQTLGFSQGGPNTMANQAKNWLPGPCYRQQRVSKTSADNNNSEYSWTRATKYHLNGRDSLVNPGPAMASHKDDEEKFFPQSGVLIFGKQGSEKTNVDIEKVMITDEEEIRTTNPVATEQYGSVSTNLQRGNRQAATADVNTQGVLPGMVWQDRDVYLQGPIWAKIPHTDGHFHPSPLMGGFGLKHPPPQILIKNTPVPADPPTTFNQSKLNSFITQYSTGQVSVEIEWELQKENSKRWNPEIQYTSNLYKSTSVDFAVNTEGVYSEPRPIGTRYLTRNL

SEQ ID NO: 780 - protein, 737 aa, synthetic construct
MAADGYLPDWLEDTLSEGIRQWWKLKPGPPPPKPAERHKDDSRGLVLPGYKYLGPFNGLDKGEPVNEADAAALEHDKAYDRQLDSGDNPYLKYNHADAEFQERLKEDTSFGGNLGRAVFQAKKRLLEPLGLVEEAAKTAPGKKRPVEHSPVEPDSSSGTGKAGQQPARKRLNFGQTGDADSVPDPQPIGEPPAAPSGVGSLTMAAGGGAPMADNNEGADGVGNSSGNWHCDSTWMGDRVITTSTRTWALPTYNNHLYKQISNSTSGGSSNDNAYFGYSTPWGYFDFNRFHCHFSPRDWQRLINNNWGFRPKRLSFKLFNIQVKEVTQNEGTKTIANNLTSTIQVFTDSEYQLPYVLGSAHQGCLPPFPADVFMIPQYGYLTLNNGSQAVGRSSFYCLEYFPSQMLRTGNNFQFTYTFEDVPFHSSYAHSQSLDRLMNPLIDQYLYYLSRTQTTGGTTNTQTLGFSQGGPNTMANQAKNWLPGPCYRQQRVSKTSADNNNSEYSWTGATKYHLNGRDSLVNPGPAMASHKDDEEKFFPQSGVLIFGKQGSEKTNVDIEKVMITDEEEIRTTNPVATEQYGSVSTNLQRGNRQAATADVNTQGVLPGMVWQDRDVYLQGPIWAKIPHTDGHFHPSPLMGGFGLKHPPPQILIKNTPVPADPPTTFNQSKLNSFITQYSTGQVSVEIEWELQKENSKRWNPEIQYTSNLCKSTSVDFAVNTEGVYSEPRPIGTRYLTRNL

SEQ ID NO: 781 - protein, 737 aa, synthetic construct
MAADGYLPDWLEDTLSEGIRQWWKLKPGPPPPKPAERHKDDSRGLVLPGYKYLGPFNGLDKGEPVNEADAAALEHDKAYDRQLDSGDNPYLKYNHADAEFQERLKEDTSFGGNLGRAVFQAKKRLLEPLGLVEEAAKTAPGKKRPVEHSPVEPDSSSGTGKAGQQPARKRLNFGQTGDADSVPDPQPIGEPPAAPSGVGSLTMAAGGGAPMADNNEGADGVGNSSGNWHCDSTWMGDRVITTSTRTWALPTYNNHLYKQISNSTSGGSSNDNAYFGYSTPWGYFDFNRFHCHFSPRDWQRLINNNWGFRPKRLSFKLFNIQVKEVTQNEGTKTIANNLTSTIQVFTDSEYQLPYVLGSAHQGCLPPFPADVFMIPQYGYLTLNNGSQAVGRSSFYCLEYFPSQMLRTGNNFQFTYTFEDVPFHSSYAHSQSLDRLMNPLIDQYLYYLSRTQTTGGTTNTQTLGFSQGGPNTMANQAKNWLPGPCYRQQRVSKTSADNNNSEISWTRATKYHLNGRDSLVNPGPAMASHKDDEEKFFPQSGVLIFGKQGSEKTNVDIEKVMITDEEEIRTTNPVATEQYGSVSTNLQRGNRQAATADVNTQGVLPGMVWQDRDVYLQGPIWAKIPHTDGHFHPSPLMGGFGLKHPPPQILIKNTPVPADPPTTFNQSKLNSFITQYSTGQVSVEIEWELQKENSKRWNPEIQYTSNLYKSTSVDFAVNTEGVYSEPRPIGTRYLTRNL

SEQ ID NO: 782 - protein, 737 aa, synthetic construct
MAADGYLPDWLEDTLSEGIRQWWKLKPGPPPPKPAERHKDDSRGLVLPGYKYLGPFNGLDKGEPVNEADAAALEHDKAYDRQLDSGDNPYLKYNHADAEFQERLKEDTSFGGNLGRAVFQAKKRLLEPLGLVEEAAKTAPGKKRPVEHSPVEPDSSSGTGKAGQQPARKRLNFGQTGDADSVPDPQPIGEPPAAPSGVGSLTMAAGGGAPMADNNEGADGVGNSSGNWHCDSTWMGDRVITTSTRTWALPTYNNHLYKQISNSTSGGSSNDNAYFGYSTPWGYFDFNRFHCHFSPRDWQRLINNNWGFRPKRLSFKLFNIQVKEVTQNEGTKTIANNLTSTIQVFTDSEYQLPYVLGSAHQGCLPPFPADVFMIPQYGYLTLNNGSQAVGRSSFYCLEYFPSQMLRTGNNFQFTYTFEDVPFHSSYAHSQSLDRLMNPLIDQYLYYLSRTQTTGGTTNTQTLGFSQGGPNTMANQAKNWLPGPCYRQQRVSKTSADNNNSEYSWTRATKYHLNGRDSLVNPGPAMASHKDDEEKFFPQSGVLIFGKQGSEKTNVDIEKVMITDEEEIRTTNPVATEQYGSVSTNLQRGNRQAATADVNTQGVLPGMVWQDRDVYLQGPIWAKIPHTDGHFHPSPLMGGFGLKHPPPQILIKNTPVPADPPTTFNQSKLNSFITQYSTGQVSVEIEWELQKENSKRWNPEIQYTSNLCKSTSVDFAVNTEGVYSEPRPIGTRYLTRNL

SEQ ID NO: 783 - protein, 737 aa, synthetic construct
MAADGYLPDWLEDTLSEGIRQWWKLKPGPPPPKPAERHKDDSRGLVLPGYKYLGPFNGLDKGEPVNEADAAALEHDKAYDRQLDSGDNPYLKYNHADAEFQERLKEDTSFGGNLGRAVFQAKKRLLEPLGLVEEAAKTAPGKKRPVEHSPVEPDSSSGTGKAGQQPARKRLNFGQTGDADSVPDPQPIGEPPAAPSGVGSLTMAAGGGAPMADNNEGADGVGNSSGNWHCDSTWMGDRVITTSTRTWALPTYNNHLYKQISNSTSGGSSNDNAYFGYSTPWGYFDFNRFHCHFSPRDWQRLINNNWGFRPKRLSFKLFNIQVKEVTQNEGTKTIANNLTSTIQVFTDSEYQLPYVLGSAHQGCLPPFPADVFMIPQYGYLTLNNGSQAVGRSSFYCLEYFPSQMLRTGNNFQFTYTFEDVPFHSSYAHSQSLDRLMNPLIDQYLYYLSRTQTTGGTTNTQTLGFSQGGPNTMANQAKNWLPGPCYRQQRVSKTSADNNNSEISWTGATKYHLNGRDSLVNPGPAMASHKDDEEKFFPQSGVLIFGKQGSEKTNVDIEKVMITDEEEIRTTNPVATEQYGSVSTNLQRGNRQAATADVNTQGVLPGMVWQDRDVYLQGPIWAKIPHTDGHFHPSPLMGGFGLKHPPPQILIKNTPVPADPPTTFNQSKLNSFITQYSTGQVSVEIEWELQKENSKRWNPEIQYTSNLCKSTSVDFAVNTEGVYSEPRPIGTRYLTRNL

SEQ ID NO: 784 - protein, 737 aa, synthetic construct
MAADGYLPDWLEDTLSEGIRQWWKLKPGPPPPKPAERHKDDSRGLVLPGYKYLGPFNGLDKGEPVNEADAAALEHDKAYDRQLDSGDNPYLKYNHADAEFQERLKEDTSFGGNLGRAVFQAKKRLLEPLGLVEEAAKTAPGKKRPVEHSPVEPDSSSGTGKAGQQPARKRLNFGQTGDADSVPDPQPIGEPPAAPSGVGSLTMAAGGGAPMADNNEGADGVGNSSGNWHCDSTWMGDRVITTSTRTWALPTYNNHLYKQISNSTSGGSSNDNAYFGYSTPWGYFDFNRFHCHFSPRDWQRLINNNWGFRPKRLSFKLFNIQVKEVTQNEGTKTIANNLTSTIQVFTDSEYQLPYVLGSAHQGCLPPFPADVFMIPQYGYLTLNNGSQAVGRSSFYCLEYFPSQMLRTGNNFQFTYTFEDVPFHSSYAHSQSLDRLMNPLIDQYLYYLSRTQTTGGTTNTQTLGFSQGGPNTMANQAKNWLPGPCYRQQRVSKTSADNNNSEISWTRATKYHLNGRDSLVNPGPAMASHKDDEEKFFPQSGVLIFGKQGSEKTNVDIEKVMITDEEEIRTTNPVATEQYGSVSTNLQRGNRQAATADVNTQGVLPGMVWQDRDVYLQGPIWAKIPHTDGHFHPSPLMGGFGLKHPPPQILIKNTPVPADPPTTFNQSKLNSFITQYSTGQVSVEIEWELQKENSKRWNPEIQYTSNLCKSTSVDFAVNTEGVYSEPRPIGTRYLTRNL

SEQ ID NO: 785 - protein, 737 aa, synthetic construct
MAADGYLPDWLEDTLSEGIRQWWKLKPGPPPPKPAERHKDDSRGLVLPGYKYLGPFNGLDKGEPVNEADAAALEHDKAYDRQLDSGDNPYLKYNHADAEFQERLKEDTSFGGNLGRAVFQAKKRLLEPLGLVEEAAKTAPGKKRPVEHSPVEPDSSSGTGKAGQQPARKRLNFGQTGDADSVPDPQPIGEPPAAPSGVGSLTMAAGGGAPMADNNEGADGVGNSSGNWHCDSTWMGDRVITTSTRTWALPTYNNHLYKQISNSTSGGSSNDNAYFGYSTPWGYFDFNRFHCHFSPRDWQRLINNNWGFRPKRLSFKLFNIQVKEVTQNEGTKTIANNLTSTIQVFGDSEYQLPYVLGSAHQGCLPPFPADVFMIPQYGYLTLNNGSQAVGRSSFYCLEYFPSQMLRTGNNFQFTYTFEDVPFHSSYAHSQSLDRLMNPLIDQYLYYLSRTQTTGGTTNTQTLGFSQGGPNTMANQAKNWLPGPCYRQQRVSKTSADNNNSEYSWTGATKYHLNGRDSLVNPGPAMASHKDDEEKFFPQSGVLIFGKQGSEKTNVDIEKVMITDEEEIRTTNPVATEQYGSVSTNLQRGNRQAATADVNTQGVLPGMVWQDRDVYLQGPIWAKIPHTDGHFHPSPLMGGFGLKHPPPQILIKNTPVPADPPTTFNQSKLNSFITQYSTGQVSVEIEWELQKENSKRWNPEIQYTSNLYKSTSVDFAVNTEGVYSEPRPIGTRYLTRNL

SEQ ID NO: 786 - protein, 737 aa, synthetic construct
MAADGYLPDWLEDTLSEGIRQWWKLKPGPPPPKPAERHKDDSRGLVLPGYKYLGPFNGLDKGEPVNEADAAALEHDKAYDRQLDSGDNPYLKYNHADAEFQERLKEDTSFGGNLGRAVFQAKKRLLEPLGLVEEAAKTAPGKKRPVEHSPVEPDSSSGTGKAGQQPARKRLNFGQTGDADSVPDPQPIGEPPAAPSGVGSLTMAAGGGAPMADNNEGADGVGNSSGNWHCDSTWMGDRVITTSTRTWALPTYNNHLYKQISNSTSGGSSNDNAYFGYSTPWGYFDFNRFHCHFSPRDWQRLINNNWGFRPKRLSFKLFNIQVKEVTQNEGTKTIANNLTSTIQVFGDSEYQLPYVLGSAHQGCLPPFPADVFMIPQYGYLTLNNGSQAVGRSSFYCLEYFPSQMLRTGNNFQFTYTFEDVPFHSSYAHSQSLDRLMNPLIDQYLYYLSRTQTTGGTTNTQTLGFSQGGPNTMANQAKNWLPGPCYRQQRVSKTSADNNNSEISWTGATKYHLNGRDSLVNPGPAMASHKDDEEKFFPQSGVLIFGKQGSEKTNVDIEKVMITDEEEIRTTNPVATEQYGSVSTNLQRGNRQAATADVNTQGVLPGMVWQDRDVYLQGPIWAKIPHTDGHFHPSPLMGGFGLKHPPPQILIKNTPVPADPPTTFNQSKLNSFITQYSTGQVSVEIEWELQKENSKRWNPEIQYTSNLYKSTSVDFAVNTEGVYSEPRPIGTRYLTRNL

SEQ ID NO: 787 - protein, 737 aa, synthetic construct
MAADGYLPDWLEDTLSEGIRQWWKLKPGPPPPKPAERHKDDSRGLVLPGYKYLGPFNGLDKGEPVNEADAAALEHDKAYDRQLDSGDNPYLKYNHADAEFQERLKEDTSFGGNLGRAVFQAKKRLLEPLGLVEEAAKTAPGKKRPVEHSPVEPDSSSGTGKAGQQPARKRLNFGQTGDADSVPDPQPIGEPPAAPSGVGSLTMAAGGGAPMADNNEGADGVGNSSGNWHCDSTWMGDRVITTSTRTWALPTYNNHLYKQISNSTSGGSSNDNAYFGYSTPWGYFDFNRFHCHFSPRDWQRLINNNWGFRPKRLSFKLFNIQVKEVTQNEGTKTIANNLTSTIQVFGDSEYQLPYVLGSAHQGCLPPFPADVFMIPQYGYLTLNNGSQAVGRSSFYCLEYFPSQMLRTGNNFQFTYTFEDVPFHSSYAHSQSLDRLMNPLIDQYLYYLSRTQTTGGTTNTQTLGFSQGGPNTMANQAKNWLPGPCYRQQRVSKTSADNNNSEYSWTRATKYHLNGRDSLVNPGPAMASHKDDEEKFFPQSGVLIFGKQGSEKTNVDIEKVMITDEEEIRTTNPVATEQYGSVSTNLQRGNRQAATADVNTQGVLPGMVWQDRDVYLQGPIWAKIPHTDGHFHPSPLMGGFGLKHPPPQILIKNTPVPADPPTTFNQSKLNSFITQYSTGQVSVEIEWELQKENSKRWNPEIQYTSNLYKSTSVDFAVNTEGVYSEPRPIGTRYLTRNL

SEQ ID NO: 788 - protein, 737 aa, synthetic construct
MAADGYLPDWLEDTLSEGIRQWWKLKPGPPPPKPAERHKDDSRGLVLPGYKYLGPFNGLDKGEPVNEADAAALEHDKAYDRQLDSGDNPYLKYNHADAEFQERLKEDTSFGGNLGRAVFQAKKRLLEPLGLVEEAAKTAPGKKRPVEHSPVEPDSSSGTGKAGQQPARKRLNFGQTGDADSVPDPQPIGEPPAAPSGVGSLTMAAGGGAPMADNNEGADGVGNSSGNWHCDSTWMGDRVITTSTRTWALPTYNNHLYKQISNSTSGGSSNDNAYFGYSTPWGYFDFNRFHCHFSPRDWQRLINNNWGFRPKRLSFKLFNIQVKEVTQNEGTKTIANNLTSTIQVFGDSEYQLPYVLGSAHQGCLPPFPADVFMIPQYGYLTLNNGSQAVGRSSFYCLEYFPSQMLRTGNNFQFTYTFEDVPFHSSYAHSQSLDRLMNPLIDQYLYYLSRTQTTGGTTNTQTLGFSQGGPNTMANQAKNWLPGPCYRQQRVSKTSADNNNSEYSWTGATKYHLNGRDSLVNPGPAMASHKDDEEKFFPQSGVLIFGKQGSEKTNVDIEKVMITDEEEIRTTNPVATEQYGSVSTNLQRGNRQAATADVNTQGVLPGMVWQDRDVYLQGPIWAKIPHTDGHFHPSPLMGGFGLKHPPPQILIKNTPVPADPPTTFNQSKLNSFITQYSTGQVSVEIEWELQKENSKRWNPEIQYTSNLCKSTSVDFAVNTEGVYSEPRPIGTRYLTRNL

SEQ ID NO: 789 - protein, 737 aa, synthetic construct
MAADGYLPDWLEDTLSEGIRQWWKLKPGPPPPKPAERHKDDSRGLVLPGYKYLGPFNGLDKGEPVNEADAAALEHDKAYDRQLDSGDNPYLKYNHADAEFQERLKEDTSFGGNLGRAVFQAKKRLLEPLGLVEEAAKTAPGKKRPVEHSPVEPDSSSGTGKAGQQPARKRLNFGQTGDADSVPDPQPIGEPPAAPSGVGSLTMAAGGGAPMADNNEGADGVGNSSGNWHCDSTWMGDRVITTSTRTWALPTYNNHLYKQISNSTSGGSSNDNAYFGYSTPWGYFDFNRFHCHFSPRDWQRLINNNWGFRPKRLSFKLFNIQVKEVTQNEGTKTIANNLTSTIQVFGDSEYQLPYVLGSAHQGCLPPFPADVFMIPQYGYLTLNNGSQAVGRSSFYCLEYFPSQMLRTGNNFQFTYTFEDVPFHSSYAHSQSLDRLMNPLIDQYLYYLSRTQTTGGTTNTQTLGFSQGGPNTMANQAKNWLPGPCYRQQRVSKTSADNNNSEISWTRATKYHLNGRDSLVNPGPAMASHKDDEEKFFPQSGVLIFGKQGSEKTNVDIEKVMITDEEEIRTTNPVATEQYGSVSTNLQRGNRQAATADVNTQGVLPGMVWQDRDVYLQGPIWAKIPHTDGHFHPSPLMGGFGLKHPPPQILIKNTPVPADPPTTFNQSKLNSFITQYSTGQVSVEIEWELQKENSKRWNPEIQYTSNLYKSTSVDFAVNTEGVYSEPRPIGTRYLTRNL

SEQ ID NO: 790 - protein, 737 aa, synthetic construct
MAADGYLPDWLEDTLSEGIRQWWKLKPGPPPPKPAERHKDDSRGLVLPGYKYLGPFNGLDKGEPVNEADAAALEHDKAYDRQLDSGDNPYLKYNHADAEFQERLKEDTSFGGNLGRAVFQAKKRLLEPLGLVEEAAKTAPGKKRPVEHSPVEPDSSSGTGKAGQQPARKRLNFGQTGDADSVPDPQPIGEPPAAPSGVGSLTMAAGGGAPMADNNEGADGVGNSSGNWHCDSTWMGDRVITTSTRTWALPTYNNHLYKQISNSTSGGSSNDNAYFGYSTPWGYFDFNRFHCHFSPRDWQRLINNNWGFRPKRLSFKLFNIQVKEVTQNEGTKTIANNLTSTIQVFGDSEYQLPYVLGSAHQGCLPPFPADVFMIPQYGYLTLNNGSQAVGRSSFYCLEYFPSQMLRTGNNFQFTYTFEDVPFHSSYAHSQSLDRLMNPLIDQYLYYLSRTQTTGGTTNTQTLGFSQGGPNTMANQAKNWLPGPCYRQQRVSKTSADNNNSEYSWTRATKYHLNGRDSLVNPGPAMASHKDDEEKFFPQSGVLIFGKQGSEKTNVDIEKVMITDEEEIRTTNPVATEQYGSVSTNLQRGNRQAATADVNTQGVLPGMVWQDRDVYLQGPIWAKIPHTDGHFHPSPLMGGFGLKHPPPQILIKNTPVPADPPTTFNQSKLNSFITQYSTGQVSVEIEWELQKENSKRWNPEIQYTSNLCKSTSVDFAVNTEGVYSEPRPIGTRYLTRNL

SEQ ID NO: 791 - protein, 737 aa, synthetic construct
MAADGYLPDWLEDTLSEGIRQWWKLKPGPPPPKPAERHKDDSRGLVLPGYKYLGPFNGLDKGEPVNEADAAALEHDKAYDRQLDSGDNPYLKYNHADAEFQERLKEDTSFGGNLGRAVFQAKKRLLEPLGLVEEAAKTAPGKKRPVEHSPVEPDSSSGTGKAGQQPARKRLNFGQTGDADSVPDPQPIGEPPAAPSGVGSLTMAAGGGAPMADNNEGADGVGNSSGNWHCDSTWMGDRVITTSTRTWALPTYNNHLYKQISNSTSGGSSNDNAYFGYSTPWGYFDFNRFHCHFSPRDWQRLINNNWGFRPKRLSFKLFNIQVKEVTQNEGTKTIANNLTSTIQVFGDSEYQLPYVLGSAHQGCLPPFPADVFMIPQYGYLTLNNGSQAVGRSSFYCLEYFPSQMLRTGNNFQFTYTFEDVPFHSSYAHSQSLDRLMNPLIDQYLYYLSRTQTTGGTTNTQTLGFSQGGPNTMANQAKNWLPGPCYRQQRVSKTSADNNNSEISWTGATKYHLNGRDSLVNPGPAMASHKDDEEKFFPQSGVLIFGKQGSEKTNVDIEKVMITDEEEIRTTNPVATEQYGSVSTNLQRGNRQAATADVNTQGVLPGMVWQDRDVYLQGPIWAKIPHTDGHFHPSPLMGGFGLKHPPPQILIKNTPVPADPPTTFNQSKLNSFITQYSTGQVSVEIEWELQKENSKRWNPEIQYTSNLCKSTSVDFAVNTEGVYSEPRPIGTRYLTRNL

SEQ ID NO: 792 - protein, 737 aa, synthetic construct
MAADGYLPDWLEDTLSEGIRQWWKLKPGPPPPKPAERHKDDSRGLVLPGYKYLGPFNGLDKGEPVNEADAAALEHDKAYDRQLDSGDNPYLKYNHADAEFQERLKEDTSFGGNLGRAVFQAKKRLLEPLGLVEEAAKTAPGKKRPVEHSPVEPDSSSGTGKAGQQPARKRLNFGQTGDADSVPDPQPIGEPPAAPSGVGSLTMAAGGGAPMADNNEGADGVGNSSGNWHCDSTWMGDRVITTSTRTWALPTYNNHLYKQISNSTSGGSSNDNAYFGYSTPWGYFDFNRFHCHFSPRDWQRLINNNWGFRPKRLSFKLFNIQVKEVTQNEGTKTIANNLTSTIQVFGDSEYQLPYVLGSAHQGCLPPFPADVFMIPQYGYLTLNNGSQAVGRSSFYCLEYFPSQMLRTGNNFQFTYTFEDVPFHSSYAHSQSLDRLMNPLIDQYLYYLSRTQTTGGTTNTQTLGFSQGGPNTMANQAKNWLPGPCYRQQRVSKTSADNNNSEISWTRATKYHLNGRDSLVNPGPAMASHKDDEEKFFPQSGVLIFGKQGSEKTNVDIEKVMITDEEEIRTTNPVATEQYGSVSTNLQRGNRQAATADVNTQGVLPGMVWQDRDVYLQGPIWAKIPHTDGHFHPSPLMGGFGLKHPPPQILIKNTPVPADPPTTFNQSKLNSFITQYSTGQVSVEIEWELQKENSKRWNPEIQYTSNLCKSTSVDFAVNTEGVYSEPRPIGTRYLTRNL

SEQ ID NO: 793 - protein, 737 aa, synthetic construct
MAADGYLPDWLEDTLSEGIRQWWKLKPGPPPPKPAERHKDDSRGLVLPGYKYLGPFNGLDKGEPVNEADAAALEHDKAYDRQLDSGDNPYLKYNHADAEFQERLKEDTSFGGNLGRAVFQAKKRLLEPLGLVEEAAKTAPGKKRPVEHSPVEPDSSSGTGKAGQQPARKRLNFGQTGDADSVPDPQPIGEPPAAPSGVGSLTMAAGGGAPMADNNEGADGVGNSSGNWHCDSTWMGDRVITTSTRTWALPTYNNHLYKQISNSTSGGSSNDNAYFGYSTPWGYFDFNRFHCHFSPRDWQRLINNNWGFRPKRLSFKLFNIQVKEVTQNEGTKTIANNLTSTIQVFADSEYQLPYVLGSAHQGCLPPFPADVFMIPQYGYLTLNNGSQAVGRSSFYCLEYFPSQMLRTGNNFQFTYTFEDVPFHSSYAHSQSLDRLMNPLIDQYLYYLSRTQTTGGTTNTQTLGFSQGGPNTMANQAKNWLPGPCYRQQRVSKTSADNNNSEYSWTGATKYHLNGRDSLVNPGPAMASHKDDEEKFFPQSGVLIFGKQGSEKTNVDIEKVMITDEEEIRTTNPVATEQYGSVSTNLQRGNRQAATADVNTQGVLPGMVWQDRDVYLQGPIWAKIPHTDGHFHPSPLMGGFGLKHPPPQILIKNTPVPADPPTTFNQSKLNSFITQYSTGQVSVEIEWELQKENSKRWNPEIQYTSNLYKSTSVDFAVNTEGVYSEPRPIGTRYLTRNL

SEQ ID NO: 794 - protein, 737 aa, synthetic construct
MAADGYLPDWLEDTLSEGIRQWWKLKPGPPPPKPAERHKDDSRGLVLPGYKYLGPFNGLDKGEPVNEADAAALEHDKAYDRQLDSGDNPYLKYNHADAEFQERLKEDTSFGGNLGRAVFQAKKRLLEPLGLVEEAAKTAPGKKRPVEHSPVEPDSSSGTGKAGQQPARKRLNFGQTGDADSVPDPQPIGEPPAAPSGVGSLTMAAGGGAPMADNNEGADGVGNSSGNWHCDSTWMGDRVITTSTRTWALPTYNNHLYKQISNSTSGGSSNDNAYFGYSTPWGYFDFNRFHCHFSPRDWQRLINNNWGFRPKRLSFKLFNIQVKEVTQNEGTKTIANNLTSTIQVFADSEYQLPYVLGSAHQGCLPPFPADVFMIPQYGYLTLNNGSQAVGRSSFYCLEYFPSQMLRTGNNFQFTYTFEDVPFHSSYAHSQSLDRLMNPLIDQYLYYLSRTQTTGGTTNTQTLGFSQGGPNTMANQAKNWLPGPCYRQQRVSKTSADNNNSEISWTGATKYHLNGRDSLVNPGPAMASHKDDEEKFFPQSGVLIFGKQGSEKTNVDIEKVMITDEEEIRTTNPVATEQYGSVSTNLQRGNRQAATADVNTQGVLPGMVWQDRDVYLQGPIWAKIPHTDGHFHPSPLMGGFGLKHPPPQILIKNTPVPADPPTTFNQSKLNSFITQYSTGQVSVEIEWELQKENSKRWNPEIQYTSNLYKSTSVDFAVNTEGVYSEPRPIGTRYLTRNL

SEQ ID NO: 795 - protein, 737 aa, synthetic construct
MAADGYLPDWLEDTLSEGIRQWWKLKPGPPPPKPAERHKDDSRGLVLPGYKYLGPFNGLDKGEPVNEADAAALEHDKAYDRQLDSGDNPYLKYNHADAEFQERLKEDTSFGGNLGRAVFQAKKRLLEPLGLVEEAAKTAPGKKRPVEHSPVEPDSSSGTGKAGQQPARKRLNFGQTGDADSVPDPQPIGEPPAAPSGVGSLTMAAGGGAPMADNNEGADGVGNSSGNWHCDSTWMGDRVITTSTRTWALPTYNNHLYKQISNSTSGGSSNDNAYFGYSTPWGYFDFNRFHCHFSPRDWQRLINNNWGFRPKRLSFKLFNIQVKEVTQNEGTKTIANNLTSTIQVFADSEYQLPYVLGSAHQGCLPPFPADVFMIPQYGYLTLNNGSQAVGRSSFYCLEYFPSQMLRTGNNFQFTYTFEDVPFHSSYAHSQSLDRLMNPLIDQYLYYLSRTQTTGGTTNTQTLGFSQGGPNTMANQAKNWLPGPCYRQQRVSKTSADNNNSEYSWTRATKYHLNGRDSLVNPGPAMASHKDDEEKFFPQSGVLIFGKQGSEKTNVDIEKVMITDEEEIRTTNPVATEQYGSVSTNLQRGNRQAATADVNTQGVLPGMVWQDRDVYLQGPIWAKIPHTDGHFHPSPLMGGFGLKHPPPQILIKNTPVPADPPTTFNQSKLNSFITQYSTGQVSVEIEWELQKENSKRWNPEIQYTSNLYKSTSVDFAVNTEGVYSEPRPIGTRYLTRNL

SEQ ID NO: 796 - protein, 737 aa, synthetic construct
MAADGYLPDWLEDTLSEGIRQWWKLKPGPPPPKPAERHKDDSRGLVLPGYKYLGPFNGLDKGEPVNEADAAALEHDKAYDRQLDSGDNPYLKYNHADAEFQERLKEDTSFGGNLGRAVFQAKKRLLEPLGLVEEAAKTAPGKKRPVEHSPVEPDSSSGTGKAGQQPARKRLNFGQTGDADSVPDPQPIGEPPAAPSGVGSLTMAAGGGAPMADNNEGADGVGNSSGNWHCDSTWMGDRVITTSTRTWALPTYNNHLYKQISNSTSGGSSNDNAYFGYSTPWGYFDFNRFHCHFSPRDWQRLINNNWGFRPKRLSFKLFNIQVKEVTQNEGTKTIANNLTSTIQVFADSEYQLPYVLGSAHQGCLPPFPADVFMIPQYGYLTLNNGSQAVGRSSFYCLEYFPSQMLRTGNNFQFTYTFEDVPFHSSYAHSQSLDRLMNPLIDQYLYYLSRTQTTGGTTNTQTLGFSQGGPNTMANQAKNWLPGPCYRQQRVSKTSADNNNSEYSWTGATKYHLNGRDSLVNPGPAMASHKDDEEKFFPQSGVLIFGKQGSEKTNVDIEKVMITDEEEIRTTNPVATEQYGSVSTNLQRGNRQAATADVNTQGVLPGMVWQDRDVYLQGPIWAKIPHTDGHFHPSPLMGGFGLKHPPPQILIKNTPVPADPPTTFNQSKLNSFITQYSTGQVSVEIEWELQKENSKRWNPEIQYTSNLCKSTSVDFAVNTEGVYSEPRPIGTRYLTRNL

SEQ ID NO: 797 - protein, 737 aa, synthetic construct
MAADGYLPDWLEDTLSEGIRQWWKLKPGPPPPKPAERHKDDSRGLVLPGYKYLGPFNGLDKGEPVNEADAAALEHDKAYDRQLDSGDNPYLKYNHADAEFQERLKEDTSFGGNLGRAVFQAKKRLLEPLGLVEEAAKTAPGKKRPVEHSPVEPDSSSGTGKAGQQPARKRLNFGQTGDADSVPDPQPIGEPPAAPSGVGSLTMAAGGGAPMADNNEGADGVGNSSGNWHCDSTWMGDRVITTSTRTWALPTYNNHLYKQISNSTSGGSSNDNAYFGYSTPWGYFDFNRFHCHFSPRDWQRLINNNWGFRPKRLSFKLFNIQVKEVTQNEGTKTIANNLTSTIQVFADSEYQLPYVLGSAHQGCLPPFPADVFMIPQYGYLTLNNGSQAVGRSSFYCLEYFPSQMLRTGNNFQFTYTFEDVPFHSSYAHSQSLDRLMNPLIDQYLYYLSRTQTTGGTTNTQTLGFSQGGPNTMANQAKNWLPGPCYRQQRVSKTSADNNNSEISWTRATKYHLNGRDSLVNPGPAMASHKDDEEKFFPQSGVLIFGKQGSEKTNVDIEKVMITDEEEIRTTNPVATEQYGSVSTNLQRGNRQAATADVNTQGVLPGMVWQDRDVYLQGPIWAKIPHTDGHFHPSPLMGGFGLKHPPPQILIKNTPVPADPPTTFNQSKLNSFITQYSTGQVSVEIEWELQKENSKRWNPEIQYTSNLYKSTSVDFAVNTEGVYSEPRPIGTRYLTRNL

SEQ ID NO: 798 - protein, 737 aa, synthetic construct
MAADGYLPDWLEDTLSEGIRQWWKLKPGPPPPKPAERHKDDSRGLVLPGYKYLGPFNGLDKGEPVNEADAAALEHDKAYDRQLDSGDNPYLKYNHADAEFQERLKEDTSFGGNLGRAVFQAKKRLLEPLGLVEEAAKTAPGKKRPVEHSPVEPDSSSGTGKAGQQPARKRLNFGQTGDADSVPDPQPIGEPPAAPSGVGSLTMAAGGGAPMADNNEGADGVGNSSGNWHCDSTWMGDRVITTSTRTWALPTYNNHLYKQISNSTSGGSSNDNAYFGYSTPWGYFDFNRFHCHFSPRDWQRLINNNWGFRPKRLSFKLFNIQVKEVTQNEGTKTIANNLTSTIQVFADSEYQLPYVLGSAHQGCLPPFPADVFMIPQYGYLTLNNGSQAVGRSSFYCLEYFPSQMLRTGNNFQFTYTFEDVPFHSSYAHSQSLDRLMNPLIDQYLYYLSRTQTTGGTTNTQTLGFSQGGPNTMANQAKNWLPGPCYRQQRVSKTSADNNNSEYSWTRATKYHLNGRDSLVNPGPAMASHKDDEEKFFPQSGVLIFGKQGSEKTNVDIEKVMITDEEEIRTTNPVATEQYGSVSTNLQRGNRQAATADVNTQGVLPGMVWQDRDVYLQGPIWAKIPHTDGHFHPSPLMGGFGLKHPPPQILIKNTPVPADPPTTFNQSKLNSFITQYSTGQVSVEIEWELQKENSKRWNPEIQYTSNLCKSTSVDFAVNTEGVYSEPRPIGTRYLTRNL

SEQ ID NO: 799 - protein, 737 aa, synthetic construct
MAADGYLPDWLEDTLSEGIRQWWKLKPGPPPPKPAERHKDDSRGLVLPGYKYLGPFNGLDKGEPVNEADAAALEHDKAYDRQLDSGDNPYLKYNHADAEFQERLKEDTSFGGNLGRAVFQAKKRLLEPLGLVEEAAKTAPGKKRPVEHSPVEPDSSSGTGKAGQQPARKRLNFGQTGDADSVPDPQPIGEPPAAPSGVGSLTMAAGGGAPMADNNEGADGVGNSSGNWHCDSTWMGDRVITTSTRTWALPTYNNHLYKQISNSTSGGSSNDNAYFGYSTPWGYFDFNRFHCHFSPRDWQRLINNNWGFRPKRLSFKLFNIQVKEVTQNEGTKTIANNLTSTIQVFADSEYQLPYVLGSAHQGCLPPFPADVFMIPQYGYLTLNNGSQAVGRSSFYCLEYFPSQMLRTGNNFQFTYTFEDVPFHSSYAHSQSLDRLMNPLIDQYLYYLSRTQTTGGTTNTQTLGFSQGGPNTMANQAKNWLPGPCYRQQRVSKTSADNNNSEISWTGATKYHLNGRDSLVNPGPAMASHKDDEEKFFPQSGVLIFGKQGSEKTNVDIEKVMITDEEEIRTTNPVATEQYGSVSTNLQRGNRQAATADVNTQGVLPGMVWQDRDVYLQGPIWAKIPHTDGHFHPSPLMGGFGLKHPPPQILIKNTPVPADPPTTFNQSKLNSFITQYSTGQVSVEIEWELQKENSKRWNPEIQYTSNLCKSTSVDFAVNTEGVYSEPRPIGTRYLTRNL

SEQ ID NO: 800 - protein, 737 aa, synthetic construct
MAADGYLPDWLEDTLSEGIRQWWKLKPGPPPPKPAERHKDDSRGLVLPGYKYLGPFNGLDKGEPVNEADAAALEHDKAYDRQLDSGDNPYLKYNHADAEFQERLKEDTSFGGNLGRAVFQAKKRLLEPLGLVEEAAKTAPGKKRPVEHSPVEPDSSSGTGKAGQQPARKRLNFGQTGDADSVPDPQPIGEPPAAPSGVGSLTMAAGGGAPMADNNEGADGVGNSSGNWHCDSTWMGDRVITTSTRTWALPTYNNHLYKQISNSTSGGSSNDNAYFGYSTPWGYFDFNRFHCHFSPRDWQRLINNNWGFRPKRLSFKLFNIQVKEVTQNEGTKTIANNLTSTIQVFADSEYQLPYVLGSAHQGCLPPFPADVFMIPQYGYLTLNNGSQAVGRSSFYCLEYFPSQMLRTGNNFQFTYTFEDVPFHSSYAHSQSLDRLMNPLIDQYLYYLSRTQTTGGTTNTQTLGFSQGGPNTMANQAKNWLPGPCYRQQRVSKTSADNNNSEISWTRATKYHLNGRDSLVNPGPAMASHKDDEEKFFPQSGVLIFGKQGSEKTNVDIEKVMITDEEEIRTTNPVATEQYGSVSTNLQRGNRQAATADVNTQGVLPGMVWQDRDVYLQGPIWAKIPHTDGHFHPSPLMGGFGLKHPPPQILIKNTPVPADPPTTFNQSKLNSFITQYSTGQVSVEIEWELQKENSKRWNPEIQYTSNLCKSTSVDFAVNTEGVYSEPRPIGTRYLTRNL

SEQ ID NO: 801 - protein, 736 aa, synthetic construct
MAADGYLPDWLEDNLSEGIREWWDLKPGAPKPKANQQKQDDGRGLVLPGYKYLGPFNGLDKGEPVNAADAAALEHDKAYDQQLKAGDNPYLRYNHADAEFQERLQEDTSFGGNLGRAVFQAKKRVLEPLGLVEEGAKTAPGKKRPVEQSPQEPDSSSGIGKKGQQPARKRLNFGQTGDSESVPDPQPLGEPPAAPSGVGSNTMAAGGGAPMADNNEGADGVGNASGNWHCDSTWLGDRVITTSTRTWALPTYNNHLYKQISSQSGGSTNDNTYFGYSTPWGYFDFNRFHCHFSPRDWQRLINNNWGFRPKKLNFKLFNIQVKEVTTNDGTTTIANNLTSTVQVFGDSEYQLPYVLGSAHQGCLPPFPADVFMIPQYGYLTLNNGSQAVGRSSFYCLEYFPSQMLRTGNNFQFSYTFEDVPFHSSYAHSQSLDRLMNPLIDQYLYYLSRTQTTSGTAGNRTLQFSQAGPSSMANQAKNWLPGPCYRQQRVSKTTNQNNNSNFAWTGATKYHLNGRDSLVNPGPAMATHKDDEDKFFPMSGVLIFGKQGAGNSNVDLDNVMITNEEEIKTTNPVATEEYGTVATNLQSANTAPATGTVNSQGALPGMVWQDRDVYLQGPIWAKIPHTDGHFHPSPLMGGFGLKHPPPQILIKNTPVPANPPTTFSPAKFASFITQYSTGQVSVEIEWELQKENSKRWNPEIQYTSNYNKSTNVDFAVDTNGVYSEPRPIGTRYLTRNL

SEQ ID NO: 802 - protein, 736 aa, synthetic construct
MAADGYLPDWLEDNLSEGIREWWDLKPGAPKPKANQQKQDDGRGLVLPGYKYLGPFNGLDKGEPVNAADAAALEHDKAYDQQLKAGDNPYLRYNHADAEFQERLQEDTSFGGNLGRAVFQAKKRVLEPLGLVEEGAKTAPGKKRPVEQSPQEPDSSSGIGKKGQQPARKRLNFGQTGDSESVPDPQPLGEPPAAPSGVGSNTMAAGGGAPMADNNEGADGVGNASGNWHCDSTWLGDRVITTSTRTWALPTYNNHLYKQISSQSGGSTNDNTYFGYSTPWGYFDFNRFHCHFSPRDWQRLINNNWGFRPKKLNFKLFNIQVKEVTTNDGTTTIANNLTSTVQVFGDSEYQLPYVLGSAHQGCLPPFPADVFMIPQYGYLTLNNGSQAVGRSSFYCLEYFPSQMLRTGNNFQFSYTFEDVPFHSSYAHSQSLDRLMNPLIDQYLYYLSRTQTTSGTAGNRTLQFSQAGPSSMANQAKNWLPGPCYRQQRVSKTTNQNNNSNIAWTGATKYHLNGRDSLVNPGPAMATHKDDEDKFFPMSGVLIFGKQGAGNSNVDLDNVMITNEEEIKTTNPVATEEYGTVATNLQSANTAPATGTVNSQGALPGMVWQDRDVYLQGPIWAKIPHTDGHFHPSPLMGGFGLKHPPPQILIKNTPVPANPPTTFSPAKFASFITQYSTGQVSVEIEWELQKENSKRWNPEIQYTSNYNKSTNVDFAVDTNGVYSEPRPIGTRYLTRNL

SEQ ID NO: 803 - protein, 736 aa, synthetic construct
MAADGYLPDWLEDNLSEGIREWWDLKPGAPKPKANQQKQDDGRGLVLPGYKYLGPFNGLDKGEPVNAADAAALEHDKAYDQQLKAGDNPYLRYNHADAEFQERLQEDTSFGGNLGRAVFQAKKRVLEPLGLVEEGAKTAPGKKRPVEQSPQEPDSSSGIGKKGQQPARKRLNFGQTGDSESVPDPQPLGEPPAAPSGVGSNTMAAGGGAPMADNNEGADGVGNASGNWHCDSTWLGDRVITTSTRTWALPTYNNHLYKQISSQSGGSTNDNTYFGYSTPWGYFDFNRFHCHFSPRDWQRLINNNWGFRPKKLNFKLFNIQVKEVTTNDGTTTIANNLTSTVQVFGDSEYQLPYVLGSAHQGCLPPFPADVFMIPQYGYLTLNNGSQAVGRSSFYCLEYFPSQMLRTGNNFQFSYTFEDVPFHSSYAHSQSLDRLMNPLIDQYLYYLSRTQTTSGTAGNRTLQFSQAGPSSMANQAKNWLPGPCYRQQRVSKTTNQNNNSNFAWTRATKYHLNGRDSLVNPGPAMATHKDDEDKFFPMSGVLIFGKQGAGNSNVDLDNVMITNEEEIKTTNPVATEEYGTVATNLQSANTAPATGTVNSQGALPGMVWQDRDVYLQGPIWAKIPHTDGHFHPSPLMGGFGLKHPPPQILIKNTPVPANPPTTFSPAKFASFITQYSTGQVSVEIEWELQKENSKRWNPEIQYTSNYNKSTNVDFAVDTNGVYSEPRPIGTRYLTRNL

SEQ ID NO: 804 - protein, 736 aa, synthetic construct
MAADGYLPDWLEDNLSEGIREWWDLKPGAPKPKANQQKQDDGRGLVLPGYKYLGPFNGLDKGEPVNAADAAALEHDKAYDQQLKAGDNPYLRYNHADAEFQERLQEDTSFGGNLGRAVFQAKKRVLEPLGLVEEGAKTAPGKKRPVEQSPQEPDSSSGIGKKGQQPARKRLNFGQTGDSESVPDPQPLGEPPAAPSGVGSNTMAAGGGAPMADNNEGADGVGNASGNWHCDSTWLGDRVITTSTRTWALPTYNNHLYKQISSQSGGSTNDNTYFGYSTPWGYFDFNRFHCHFSPRDWQRLINNNWGFRPKKLNFKLFNIQVKEVTTNDGTTTIANNLTSTVQVFGDSEYQLPYVLGSAHQGCLPPFPADVFMIPQYGYLTLNNGSQAVGRSSFYCLEYFPSQMLRTGNNFQFSYTFEDVPFHSSYAHSQSLDRLMNPLIDQYLYYLSRTQTTSGTAGNRTLQFSQAGPSSMANQAKNWLPGPCYRQQRVSKTTNQNNNSNFAWTGATKYHLNGRDSLVNPGPAMATHKDDEDKFFPMSGVLIFGKQGAGNSNVDLDNVMITNEEEIKTTNPVATEEYGTVATNLQSANTAPATGTVNSQGALPGMVWQDRDVYLQGPIWAKIPHTDGHFHPSPLMGGFGLKHPPPQILIKNTPVPANPPTTFSPAKFASFITQYSTGQVSVEIEWELQKENSKRWNPEIQYTSNYCKSTNVDFAVDTNGVYSEPRPIGTRYLTRNL

SEQ ID NO: 805 - protein, 736 aa, synthetic construct
MAADGYLPDWLEDNLSEGIREWWDLKPGAPKPKANQQKQDDGRGLVLPGYKYLGPFNGLDKGEPVNAADAAALEHDKAYDQQLKAGDNPYLRYNHADAEFQERLQEDTSFGGNLGRAVFQAKKRVLEPLGLVEEGAKTAPGKKRPVEQSPQEPDSSSGIGKKGQQPARKRLNFGQTGDSESVPDPQPLGEPPAAPSGVGSNTMAAGGGAPMADNNEGADGVGNASGNWHCDSTWLGDRVITTSTRTWALPTYNNHLYKQISSQSGGSTNDNTYFGYSTPWGYFDFNRFHCHFSPRDWQRLINNNWGFRPKKLNFKLFNIQVKEVTTNDGTTTIANNLTSTVQVFGDSEYQLPYVLGSAHQGCLPPFPADVFMIPQYGYLTLNNGSQAVGRSSFYCLEYFPSQMLRTGNNFQFSYTFEDVPFHSSYAHSQSLDRLMNPLIDQYLYYLSRTQTTSGTAGNRTLQFSQAGPSSMANQAKNWLPGPCYRQQRVSKTTNQNNNSNIAWTRATKYHLNGRDSLVNPGPAMATHKDDEDKFFPMSGVLIFGKQGAGNSNVDLDNVMITNEEEIKTTNPVATEEYGTVATNLQSANTAPATGTVNSQGALPGMVWQDRDVYLQGPIWAKIPHTDGHFHPSPLMGGFGLKHPPPQILIKNTPVPANPPTTFSPAKFASFITQYSTGQVSVEIEWELQKENSKRWNPEIQYTSNYNKSTNVDFAVDTNGVYSEPRPIGTRYLTRNL

SEQ ID NO: 806 - protein, 736 aa, synthetic construct
MAADGYLPDWLEDNLSEGIREWWDLKPGAPKPKANQQKQDDGRGLVLPGYKYLGPFNGLDKGEPVNAADAAALEHDKAYDQQLKAGDNPYLRYNHADAEFQERLQEDTSFGGNLGRAVFQAKKRVLEPLGLVEEGAKTAPGKKRPVEQSPQEPDSSSGIGKKGQQPARKRLNFGQTGDSESVPDPQPLGEPPAAPSGVGSNTMAAGGGAPMADNNEGADGVGNASGNWHCDSTWLGDRVITTSTRTWALPTYNNHLYKQISSQSGGSTNDNTYFGYSTPWGYFDFNRFHCHFSPRDWQRLINNNWGFRPKKLNFKLFNIQVKEVTTNDGTTTIANNLTSTVQVFGDSEYQLPYVLGSAHQGCLPPFPADVFMIPQYGYLTLNNGSQAVGRSSFYCLEYFPSQMLRTGNNFQFSYTFEDVPFHSSYAHSQSLDRLMNPLIDQYLYYLSRTQTTSGTAGNRTLQFSQAGPSSMANQAKNWLPGPCYRQQRVSKTTNQNNNSNIAWTGATKYHLNGRDSLVNPGPAMATHKDDEDKFFPMSGVLIFGKQGAGNSNVDLDNVMITNEEEIKTTNPVATEEYGTVATNLQSANTAPATGTVNSQGALPGMVWQDRDVYLQGPIWAKIPHTDGHFHPSPLMGGFGLKHPPPQILIKNTPVPANPPTTFSPAKFASFITQYSTGQVSVEIEWELQKENSKRWNPEIQYTSNYCKSTNVDFAVDTNGVYSEPRPIGTRYLTRNL

SEQ ID NO: 807 - protein, 736 aa, synthetic construct
MAADGYLPDWLEDNLSEGIREWWDLKPGAPKPKANQQKQDDGRGLVLPGYKYLGPFNGLDKGEPVNAADAAALEHDKAYDQQLKAGDNPYLRYNHADAEFQERLQEDTSFGGNLGRAVFQAKKRVLEPLGLVEEGAKTAPGKKRPVEQSPQEPDSSSGIGKKGQQPARKRLNFGQTGDSESVPDPQPLGEPPAAPSGVGSNTMAAGGGAPMADNNEGADGVGNASGNWHCDSTWLGDRVITTSTRTWALPTYNNHLYKQISSQSGGSTNDNTYFGYSTPWGYFDFNRFHCHFSPRDWQRLINNNWGFRPKKLNFKLFNIQVKEVTTNDGTTTIANNLTSTVQVFGDSEYQLPYVLGSAHQGCLPPFPADVFMIPQYGYLTLNNGSQAVGRSSFYCLEYFPSQMLRTGNNFQFSYTFEDVPFHSSYAHSQSLDRLMNPLIDQYLYYLSRTQTTSGTAGNRTLQFSQAGPSSMANQAKNWLPGPCYRQQRVSKTTNQNNNSNFAWTRATKYHLNGRDSLVNPGPAMATHKDDEDKFFPMSGVLIFGKQGAGNSNVDLDNVMITNEEEIKTTNPVATEEYGTVATNLQSANTAPATGTVNSQGALPGMVWQDRDVYLQGPIWAKIPHTDGHFHPSPLMGGFGLKHPPPQILIKNTPVPANPPTTFSPAKFASFITQYSTGQVSVEIEWELQKENSKRWNPEIQYTSNYCKSTNVDFAVDTNGVYSEPRPIGTRYLTRNL

SEQ ID NO: 808 - protein, 736 aa, synthetic construct
MAADGYLPDWLEDNLSEGIREWWDLKPGAPKPKANQQKQDDGRGLVLPGYKYLGPFNGLDKGEPVNAADAAALEHDKAYDQQLKAGDNPYLRYNHADAEFQERLQEDTSFGGNLGRAVFQAKKRVLEPLGLVEEGAKTAPGKKRPVEQSPQEPDSSSGIGKKGQQPARKRLNFGQTGDSESVPDPQPLGEPPAAPSGVGSNTMAAGGGAPMADNNEGADGVGNASGNWHCDSTWLGDRVITTSTRTWALPTYNNHLYKQISSQSGGSTNDNTYFGYSTPWGYFDFNRFHCHFSPRDWQRLINNNWGFRPKKLNFKLFNIQVKEVTTNDGTTTIANNLTSTVQVFGDSEYQLPYVLGSAHQGCLPPFPADVFMIPQYGYLTLNNGSQAVGRSSFYCLEYFPSQMLRTGNNFQFSYTFEDVPFHSSYAHSQSLDRLMNPLIDQYLYYLSRTQTTSGTAGNRTLQFSQAGPSSMANQAKNWLPGPCYRQQRVSKTTNQNNNSNIAWTRATKYHLNGRDSLVNPGPAMATHKDDEDKFFPMSGVLIFGKQGAGNSNVDLDNVMITNEEEIKTTNPVATEEYGTVATNLQSANTAPATGTVNSQGALPGMVWQDRDVYLQGPIWAKIPHTDGHFHPSPLMGGFGLKHPPPQILIKNTPVPANPPTTFSPAKFASFITQYSTGQVSVEIEWELQKENSKRWNPEIQYTSNYCKSTNVDFAVDTNGVYSEPRPIGTRYLTRNL

SEQ ID NO: 809 - protein, 736 aa, synthetic construct
MAADGYLPDWLEDNLSEGIREWWDLKPGAPKPKANQQKQDDGRGLVLPGYKYLGPFNGLDKGEPVNAADAAALEHDKAYDQQLKAGDNPYLRYNHADAEFQERLQEDTSFGGNLGRAVFQAKKRVLEPLGLVEEGAKTAPGKKRPVEQSPQEPDSSSGIGKKGQQPARKRLNFGQTGDSESVPDPQPLGEPPAAPSGVGSNTMAAGGGAPMADNNEGADGVGNASGNWHCDSTWLGDRVITTSTRTWALPTYNNHLYKQISSQSGGSTNDNTYFGYSTPWGYFDFNRFHCHFSPRDWQRLINNNWGFRPKKLNFKLFNIQVKEVTTNDGTTTIANNLTSTVQVFTDSEYQLPYVLGSAHQGCLPPFPADVFMIPQYGYLTLNNGSQAVGRSSFYCLEYFPSQMLRTGNNFQFSYTFEDVPFHSSYAHSQSLDRLMNPLIDQYLYYLSRTQTTSGTAGNRTLQFSQAGPSSMANQAKNWLPGPCYRQQRVSKTTNQNNNSNFAWTGATKYHLNGRDSLVNPGPAMATHKDDEDKFFPMSGVLIFGKQGAGNSNVDLDNVMITNEEEIKTTNPVATEEYGTVATNLQSANTAPATGTVNSQGALPGMVWQDRDVYLQGPIWAKIPHTDGHFHPSPLMGGFGLKHPPPQILIKNTPVPANPPTTFSPAKFASFITQYSTGQVSVEIEWELQKENSKRWNPEIQYTSNLNKSTNVDFAVDTNGVYSEPRPIGTRYLTRNL

SEQ ID NO: 810 - protein, 736 aa, synthetic construct
MAADGYLPDWLEDNLSEGIREWWDLKPGAPKPKANQQKQDDGRGLVLPGYKYLGPFNGLDKGEPVNAADAAALEHDKAYDQQLKAGDNPYLRYNHADAEFQERLQEDTSFGGNLGRAVFQAKKRVLEPLGLVEEGAKTAPGKKRPVEQSPQEPDSSSGIGKKGQQPARKRLNFGQTGDSESVPDPQPLGEPPAAPSGVGSNTMAAGGGAPMADNNEGADGVGNASGNWHCDSTWLGDRVITTSTRTWALPTYNNHLYKQISSQSGGSTNDNTYFGYSTPWGYFDFNRFHCHFSPRDWQRLINNNWGFRPKKLNFKLFNIQVKEVTTNDGTTTIANNLTSTVQVFTDSEYQLPYVLGSAHQGCLPPFPADVFMIPQYGYLTLNNGSQAVGRSSFYCLEYFPSQMLRTGNNFQFSYTFEDVPFHSSYAHSQSLDRLMNPLIDQYLYYLSRTQTTSGTAGNRTLQFSQAGPSSMANQAKNWLPGPCYRQQRVSKTTNQNNNSNIAWTGATKYHLNGRDSLVNPGPAMATHKDDEDKFFPMSGVLIFGKQGAGNSNVDLDNVMITNEEEIKTTNPVATEEYGTVATNLQSANTAPATGTVNSQGALPGMVWQDRDVYLQGPIWAKIPHTDGHFHPSPLMGGFGLKHPPPQILIKNTPVPANPPTTFSPAKFASFITQYSTGQVSVEIEWELQKENSKRWNPEIQYTSNLNKSTNVDFAVDTNGVYSEPRPIGTRYLTRNL

SEQ ID NO: 811 - protein, 736 aa, synthetic construct
MAADGYLPDWLEDNLSEGIREWWDLKPGAPKPKANQQKQDDGRGLVLPGYKYLGPFNGLDKGEPVNAADAAALEHDKAYDQQLKAGDNPYLRYNHADAEFQERLQEDTSFGGNLGRAVFQAKKRVLEPLGLVEEGAKTAPGKKRPVEQSPQEPDSSSGIGKKGQQPARKRLNFGQTGDSESVPDPQPLGEPPAAPSGVGSNTMAAGGGAPMADNNEGADGVGNASGNWHCDSTWLGDRVITTSTRTWALPTYNNHLYKQISSQSGGSTNDNTYFGYSTPWGYFDFNRFHCHFSPRDWQRLINNNWGFRPKKLNFKLFNIQVKEVTTNDGTTTIANNLTSTVQVFTDSEYQLPYVLGSAHQGCLPPFPADVFMIPQYGYLTLNNGSQAVGRSSFYCLEYFPSQMLRTGNNFQFSYTFEDVPFHSSYAHSQSLDRLMNPLIDQYLYYLSRTQTTSGTAGNRTLQFSQAGPSSMANQAKNWLPGPCYRQQRVSKTTNQNNNSNFAWTRATKYHLNGRDSLVNPGPAMATHKDDEDKFFPMSGVLIFGKQGAGNSNVDLDNVMITNEEEIKTTNPVATEEYGTVATNLQSANTAPATGTVNSQGALPGMVWQDRDVYLQGPIWAKIPHTDGHFHPSPLMGGFGLKHPPPQILIKNTPVPANPPTTFSPAKFASFITQYSTGQVSVEIEWELQKENSKRWNPEIQYTSNLNKSTNVDFAVDTNGVYSEPRPIGTRYLTRNL

SEQ ID NO: 812 - protein, 736 aa, synthetic construct
MAADGYLPDWLEDNLSEGIREWWDLKPGAPKPKANQQKQDDGRGLVLPGYKYLGPFNGLDKGEPVNAADAAALEHDKAYDQQLKAGDNPYLRYNHADAEFQERLQEDTSFGGNLGRAVFQAKKRVLEPLGLVEEGAKTAPGKKRPVEQSPQEPDSSSGIGKKGQQPARKRLNFGQTGDSESVPDPQPLGEPPAAPSGVGSNTMAAGGGAPMADNNEGADGVGNASGNWHCDSTWLGDRVITTSTRTWALPTYNNHLYKQISSQSGGSTNDNTYFGYSTPWGYFDFNRFHCHFSPRDWQRLINNNWGFRPKKLNFKLFNIQVKEVTTNDGTTTIANNLTSTVQVFTDSEYQLPYVLGSAHQGCLPPFPADVFMIPQYGYLTLNNGSQAVGRSSFYCLEYFPSQMLRTGNNFQFSYTFEDVPFHSSYAHSQSLDRLMNPLIDQYLYYLSRTQTTSGTAGNRTLQFSQAGPSSMANQAKNWLPGPCYRQQRVSKTTNQNNNSNFAWTGATKYHLNGRDSLVNPGPAMATHKDDEDKFFPMSGVLIFGKQGAGNSNVDLDNVMITNEEEIKTTNPVATEEYGTVATNLQSANTAPATGTVNSQGALPGMVWQDRDVYLQGPIWAKIPHTDGHFHPSPLMGGFGLKHPPPQILIKNTPVPANPPTTFSPAKFASFITQYSTGQVSVEIEWELQKENSKRWNPEIQYTSNLCKSTNVDFAVDTNGVYSEPRPIGTRYLTRNL

SEQ ID NO: 813 - protein, 736 aa, synthetic construct
MAADGYLPDWLEDNLSEGIREWWDLKPGAPKPKANQQKQDDGRGLVLPGYKYLGPFNGLDKGEPVNAADAAALEHDKAYDQQLKAGDNPYLRYNHADAEFQERLQEDTSFGGNLGRAVFQAKKRVLEPLGLVEEGAKTAPGKKRPVEQSPQEPDSSSGIGKKGQQPARKRLNFGQTGDSESVPDPQPLGEPPAAPSGVGSNTMAAGGGAPMADNNEGADGVGNASGNWHCDSTWLGDRVITTSTRTWALPTYNNHLYKQISSQSGGSTNDNTYFGYSTPWGYFDFNRFHCHFSPRDWQRLINNNWGFRPKKLNFKLFNIQVKEVTTNDGTTTIANNLTSTVQVFTDSEYQLPYVLGSAHQGCLPPFPADVFMIPQYGYLTLNNGSQAVGRSSFYCLEYFPSQMLRTGNNFQFSYTFEDVPFHSSYAHSQSLDRLMNPLIDQYLYYLSRTQTTSGTAGNRTLQFSQAGPSSMANQAKNWLPGPCYRQQRVSKTTNQNNNSNIAWTRATKYHLNGRDSLVNPGPAMATHKDDEDKFFPMSGVLIFGKQGAGNSNVDLDNVMITNEEEIKTTNPVATEEYGTVATNLQSANTAPATGTVNSQGALPGMVWQDRDVYLQGPIWAKIPHTDGHFHPSPLMGGFGLKHPPPQILIKNTPVPANPPTTFSPAKFASFITQYSTGQVSVEIEWELQKENSKRWNPEIQYTSNLNKSTNVDFAVDTNGVYSEPRPIGTRYLTRNL

SEQ ID NO: 814 - protein, 736 aa, synthetic construct
MAADGYLPDWLEDNLSEGIREWWDLKPGAPKPKANQQKQDDGRGLVLPGYKYLGPFNGLDKGEPVNAADAAALEHDKAYDQQLKAGDNPYLRYNHADAEFQERLQEDTSFGGNLGRAVFQAKKRVLEPLGLVEEGAKTAPGKKRPVEQSPQEPDSSSGIGKKGQQPARKRLNFGQTGDSESVPDPQPLGEPPAAPSGVGSNTMAAGGGAPMADNNEGADGVGNASGNWHCDSTWLGDRVITTSTRTWALPTYNNHLYKQISSQSGGSTNDNTYFGYSTPWGYFDFNRFHCHFSPRDWQRLINNNWGFRPKKLNFKLFNIQVKEVTTNDGTTTIANNLTSTVQVFTDSEYQLPYVLGSAHQGCLPPFPADVFMIPQYGYLTLNNGSQAVGRSSFYCLEYFPSQMLRTGNNFQFSYTFEDVPFHSSYAHSQSLDRLMNPLIDQYLYYLSRTQTTSGTAGNRTLQFSQAGPSSMANQAKNWLPGPCYRQQRVSKTTNQNNNSNIAWTGATKYHLNGRDSLVNPGPAMATHKDDEDKFFPMSGVLIFGKQGAGNSNVDLDNVMITNEEEIKTTNPVATEEYGTVATNLQSANTAPATGTVNSQGALPGMVWQDRDVYLQGPIWAKIPHTDGHFHPSPLMGGFGLKHPPPQILIKNTPVPANPPTTFSPAKFASFITQYSTGQVSVEIEWELQKENSKRWNPEIQYTSNLCKSTNVDFAVDTNGVYSEPRPIGTRYLTRNL

SEQ ID NO: 815 - protein, 736 aa, synthetic construct
MAADGYLPDWLEDNLSEGIREWWDLKPGAPKPKANQQKQDDGRGLVLPGYKYLGPFNGLDKGEPVNAADAAALEHDKAYDQQLKAGDNPYLRYNHADAEFQERLQEDTSFGGNLGRAVFQAKKRVLEPLGLVEEGAKTAPGKKRPVEQSPQEPDSSSGIGKKGQQPARKRLNFGQTGDSESVPDPQPLGEPPAAPSGVGSNTMAAGGGAPMADNNEGADGVGNASGNWHCDSTWLGDRVITTSTRTWALPTYNNHLYKQISSQSGGSTNDNTYFGYSTPWGYFDFNRFHCHFSPRDWQRLINNNWGFRPKKLNFKLFNIQVKEVTTNDGTTTIANNLTSTVQVFTDSEYQLPYVLGSAHQGCLPPFPADVFMIPQYGYLTLNNGSQAVGRSSFYCLEYFPSQMLRTGNNFQFSYTFEDVPFHSSYAHSQSLDRLMNPLIDQYLYYLSRTQTTSGTAGNRTLQFSQAGPSSMANQAKNWLPGPCYRQQRVSKTTNQNNNSNFAWTRATKYHLNGRDSLVNPGPAMATHKDDEDKFFPMSGVLIFGKQGAGNSNVDLDNVMITNEEEIKTTNPVATEEYGTVATNLQSANTAPATGTVNSQGALPGMVWQDRDVYLQGPIWAKIPHTDGHFHPSPLMGGFGLKHPPPQILIKNTPVPANPPTTFSPAKFASFITQYSTGQVSVEIEWELQKENSKRWNPEIQYTSNLCKSTNVDFAVDTNGVYSEPRPIGTRYLTRNL

SEQ ID NO: 816 - protein, 736 aa, synthetic construct
MAADGYLPDWLEDNLSEGIREWWDLKPGAPKPKANQQKQDDGRGLVLPGYKYLGPFNGLDKGEPVNAADAAALEHDKAYDQQLKAGDNPYLRYNHADAEFQERLQEDTSFGGNLGRAVFQAKKRVLEPLGLVEEGAKTAPGKKRPVEQSPQEPDSSSGIGKKGQQPARKRLNFGQTGDSESVPDPQPLGEPPAAPSGVGSNTMAAGGGAPMADNNEGADGVGNASGNWHCDSTWLGDRVITTSTRTWALPTYNNHLYKQISSQSGGSTNDNTYFGYSTPWGYFDFNRFHCHFSPRDWQRLINNNWGFRPKKLNFKLFNIQVKEVTTNDGTTTIANNLTSTVQVFTDSEYQLPYVLGSAHQGCLPPFPADVFMIPQYGYLTLNNGSQAVGRSSFYCLEYFPSQMLRTGNNFQFSYTFEDVPFHSSYAHSQSLDRLMNPLIDQYLYYLSRTQTTSGTAGNRTLQFSQAGPSSMANQAKNWLPGPCYRQQRVSKTTNQNNNSNIAWTRATKYHLNGRDSLVNPGPAMATHKDDEDKFFPMSGVLIFGKQGAGNSNVDLDNVMITNEEEIKTTNPVATEEYGTVATNLQSANTAPATGTVNSQGALPGMVWQDRDVYLQGPIWAKIPHTDGHFHPSPLMGGFGLKHPPPQILIKNTPVPANPPTTFSPAKFASFITQYSTGQVSVEIEWELQKENSKRWNPEIQYTSNLCKSTNVDFAVDTNGVYSEPRPIGTRYLTRNL

SEQ ID NO: 817 - protein, 736 aa, synthetic construct
MAADGYLPDWLEDNLSEGIREWWDLKPGAPKPKANQQKQDDGRGLVLPGYKYLGPFNGLDKGEPVNAADAAALEHDKAYDQQLKAGDNPYLRYNHADAEFQERLQEDTSFGGNLGRAVFQAKKRVLEPLGLVEEGAKTAPGKKRPVEQSPQEPDSSSGIGKKGQQPARKRLNFGQTGDSESVPDPQPLGEPPAAPSGVGSNTMAAGGGAPMADNNEGADGVGNASGNWHCDSTWLGDRVITTSTRTWALPTYNNHLYKQISSQSGGSTNDNTYFGYSTPWGYFDFNRFHCHFSPRDWQRLINNNWGFRPKKLNFKLFNIQVKEVTTNDGTTTIANNLTSTVQVFGDSEYQLPYVLGSAHQGCLPPFPADVFMIPQYGYLTLNNGSQAVGRSSFYCLEYFPSQMLRTGNNFQFSYTFEDVPFHSSYAHSQSLDRLMNPLIDQYLYYLSRTQTTSGTAGNRTLQFSQAGPSSMANQAKNWLPGPCYRQQRVSKTTNQNNNSNFAWTGATKYHLNGRDSLVNPGPAMATHKDDEDKFFPMSGVLIFGKQGAGNSNVDLDNVMITNEEEIKTTNPVATEEYGTVATNLQSANTAPATGTVNSQGALPGMVWQDRDVYLQGPIWAKIPHTDGHFHPSPLMGGFGLKHPPPQILIKNTPVPANPPTTFSPAKFASFITQYSTGQVSVEIEWELQKENSKRWNPEIQYTSNLNKSTNVDFAVDTNGVYSEPRPIGTRYLTRNL

SEQ ID NO: 818 - protein, 736 aa, synthetic construct
MAADGYLPDWLEDNLSEGIREWWDLKPGAPKPKANQQKQDDGRGLVLPGYKYLGPFNGLDKGEPVNAADAAALEHDKAYDQQLKAGDNPYLRYNHADAEFQERLQEDTSFGGNLGRAVFQAKKRVLEPLGLVEEGAKTAPGKKRPVEQSPQEPDSSSGIGKKGQQPARKRLNFGQTGDSESVPDPQPLGEPPAAPSGVGSNTMAAGGGAPMADNNEGADGVGNASGNWHCDSTWLGDRVITTSTRTWALPTYNNHLYKQISSQSGGSTNDNTYFGYSTPWGYFDFNRFHCHFSPRDWQRLINNNWGFRPKKLNFKLFNIQVKEVTTNDGTTTIANNLTSTVQVFGDSEYQLPYVLGSAHQGCLPPFPADVFMIPQYGYLTLNNGSQAVGRSSFYCLEYFPSQMLRTGNNFQFSYTFEDVPFHSSYAHSQSLDRLMNPLIDQYLYYLSRTQTTSGTAGNRTLQFSQAGPSSMANQAKNWLPGPCYRQQRVSKTTNQNNNSNIAWTGATKYHLNGRDSLVNPGPAMATHKDDEDKFFPMSGVLIFGKQGAGNSNVDLDNVMITNEEEIKTTNPVATEEYGTVATNLQSANTAPATGTVNSQGALPGMVWQDRDVYLQGPIWAKIPHTDGHFHPSPLMGGFGLKHPPPQILIKNTPVPANPPTTFSPAKFASFITQYSTGQVSVEIEWELQKENSKRWNPEIQYTSNLNKSTNVDFAVDTNGVYSEPRPIGTRYLTRNL

SEQ ID NO: 819 - protein, 736 aa, synthetic construct
MAADGYLPDWLEDNLSEGIREWWDLKPGAPKPKANQQKQDDGRGLVLPGYKYLGPFNGLDKGEPVNAADAAALEHDKAYDQQLKAGDNPYLRYNHADAEFQERLQEDTSFGGNLGRAVFQAKKRVLEPLGLVEEGAKTAPGKKRPVEQSPQEPDSSSGIGKKGQQPARKRLNFGQTGDSESVPDPQPLGEPPAAPSGVGSNTMAAGGGAPMADNNEGADGVGNASGNWHCDSTWLGDRVITTSTRTWALPTYNNHLYKQISSQSGGSTNDNTYFGYSTPWGYFDFNRFHCHFSPRDWQRLINNNWGFRPKKLNFKLFNIQVKEVTTNDGTTTIANNLTSTVQVFGDSEYQLPYVLGSAHQGCLPPFPADVFMIPQYGYLTLNNGSQAVGRSSFYCLEYFPSQMLRTGNNFQFSYTFEDVPFHSSYAHSQSLDRLMNPLIDQYLYYLSRTQTTSGTAGNRTLQFSQAGPSSMANQAKNWLPGPCYRQQRVSKTTNQNNNSNFAWTRATKYHLNGRDSLVNPGPAMATHKDDEDKFFPMSGVLIFGKQGAGNSNVDLDNVMITNEEEIKTTNPVATEEYGTVATNLQSANTAPATGTVNSQGALPGMVWQDRDVYLQGPIWAKIPHTDGHFHPSPLMGGFGLKHPPPQILIKNTPVPANPPTTFSPAKFASFITQYSTGQVSVEIEWELQKENSKRWNPEIQYTSNLNKSTNVDFAVDTNGVYSEPRPIGTRYLTRNL

SEQ ID NO: 820 - protein, 736 aa, synthetic construct
MAADGYLPDWLEDNLSEGIREWWDLKPGAPKPKANQQKQDDGRGLVLPGYKYLGPFNGLDKGEPVNAADAAALEHDKAYDQQLKAGDNPYLRYNHADAEFQERLQEDTSFGGNLGRAVFQAKKRVLEPLGLVEEGAKTAPGKKRPVEQSPQEPDSSSGIGKKGQQPARKRLNFGQTGDSESVPDPQPLGEPPAAPSGVGSNTMAAGGGAPMADNNEGADGVGNASGNWHCDSTWLGDRVITTSTRTWALPTYNNHLYKQISSQSGGSTNDNTYFGYSTPWGYFDFNRFHCHFSPRDWQRLINNNWGFRPKKLNFKLFNIQVKEVTTNDGTTTIANNLTSTVQVFGDSEYQLPYVLGSAHQGCLPPFPADVFMIPQYGYLTLNNGSQAVGRSSFYCLEYFPSQMLRTGNNFQFSYTFEDVPFHSSYAHSQSLDRLMNPLIDQYLYYLSRTQTTSGTAGNRTLQFSQAGPSSMANQAKNWLPGPCYRQQRVSKTTNQNNNSNFAWTGATKYHLNGRDSLVNPGPAMATHKDDEDKFFPMSGVLIFGKQGAGNSNVDLDNVMITNEEEIKTTNPVATEEYGTVATNLQSANTAPATGTVNSQGALPGMVWQDRDVYLQGPIWAKIPHTDGHFHPSPLMGGFGLKHPPPQILIKNTPVPANPPTTFSPAKFASFITQYSTGQVSVEIEWELQKENSKRWNPEIQYTSNLCKSTNVDFAVDTNGVYSEPRPIGTRYLTRNL

SEQ ID NO: 821 - protein, 736 aa, synthetic construct
MAADGYLPDWLEDNLSEGIREWWDLKPGAPKPKANQQKQDDGRGLVLPGYKYLGPFNGLDKGEPVNAADAAALEHDKAYDQQLKAGDNPYLRYNHADAEFQERLQEDTSFGGNLGRAVFQAKKRVLEPLGLVEEGAKTAPGKKRPVEQSPQEPDSSSGIGKKGQQPARKRLNFGQTGDSESVPDPQPLGEPPAAPSGVGSNTMAAGGGAPMADNNEGADGVGNASGNWHCDSTWLGDRVITTSTRTWALPTYNNHLYKQISSQSGGSTNDNTYFGYSTPWGYFDFNRFHCHFSPRDWQRLINNNWGFRPKKLNFKLFNIQVKEVTTNDGTTTIANNLTSTVQVFGDSEYQLPYVLGSAHQGCLPPFPADVFMIPQYGYLTLNNGSQAVGRSSFYCLEYFPSQMLRTGNNFQFSYTFEDVPFHSSYAHSQSLDRLMNPLIDQYLYYLSRTQTTSGTAGNRTLQFSQAGPSSMANQAKNWLPGPCYRQQRVSKTTNQNNNSNIAWTRATKYHLNGRDSLVNPGPAMATHKDDEDKFFPMSGVLIFGKQGAGNSNVDLDNVMITNEEEIKTTNPVATEEYGTVATNLQSANTAPATGTVNSQGALPGMVWQDRDVYLQGPIWAKIPHTDGHFHPSPLMGGFGLKHPPPQILIKNTPVPANPPTTFSPAKFASFITQYSTGQVSVEIEWELQKENSKRWNPEIQYTSNLNKSTNVDFAVDTNGVYSEPRPIGTRYLTRNL

SEQ ID NO: 822 - protein, 736 aa, synthetic construct
MAADGYLPDWLEDNLSEGIREWWDLKPGAPKPKANQQKQDDGRGLVLPGYKYLGPFNGLDKGEPVNAADAAALEHDKAYDQQLKAGDNPYLRYNHADAEFQERLQEDTSFGGNLGRAVFQAKKRVLEPLGLVEEGAKTAPGKKRPVEQSPQEPDSSSGIGKKGQQPARKRLNFGQTGDSESVPDPQPLGEPPAAPSGVGSNTMAAGGGAPMADNNEGADGVGNASGNWHCDSTWLGDRVITTSTRTWALPTYNNHLYKQISSQSGGSTNDNTYFGYSTPWGYFDFNRFHCHFSPRDWQRLINNNWGFRPKKLNFKLFNIQVKEVTTNDGTTTIANNLTSTVQVFGDSEYQLPYVLGSAHQGCLPPFPADVFMIPQYGYLTLNNGSQAVGRSSFYCLEYFPSQMLRTGNNFQFSYTFEDVPFHSSYAHSQSLDRLMNPLIDQYLYYLSRTQTTSGTAGNRTLQFSQAGPSSMANQAKNWLPGPCYRQQRVSKTTNQNNNSNIAWTGATKYHLNGRDSLVNPGPAMATHKDDEDKFFPMSGVLIFGKQGAGNSNVDLDNVMITNEEEIKTTNPVATEEYGTVATNLQSANTAPATGTVNSQGALPGMVWQDRDVYLQGPIWAKIPHTDGHFHPSPLMGGFGLKHPPPQILIKNTPVPANPPTTFSPAKFASFITQYSTGQVSVEIEWELQKENSKRWNPEIQYTSNLCKSTNVDFAVDTNGVYSEPRPIGTRYLTRNL

SEQ ID NO: 823 - protein, 736 aa, synthetic construct
MAADGYLPDWLEDNLSEGIREWWDLKPGAPKPKANQQKQDDGRGLVLPGYKYLGPFNGLDKGEPVNAADAAALEHDKAYDQQLKAGDNPYLRYNHADAEFQERLQEDTSFGGNLGRAVFQAKKRVLEPLGLVEEGAKTAPGKKRPVEQSPQEPDSSSGIGKKGQQPARKRLNFGQTGDSESVPDPQPLGEPPAAPSGVGSNTMAAGGGAPMADNNEGADGVGNASGNWHCDSTWLGDRVITTSTRTWALPTYNNHLYKQISSQSGGSTNDNTYFGYSTPWGYFDFNRFHCHFSPRDWQRLINNNWGFRPKKLNFKLFNIQVKEVTTNDGTTTIANNLTSTVQVFGDSEYQLPYVLGSAHQGCLPPFPADVFMIPQYGYLTLNNGSQAVGRSSFYCLEYFPSQMLRTGNNFQFSYTFEDVPFHSSYAHSQSLDRLMNPLIDQYLYYLSRTQTTSGTAGNRTLQFSQAGPSSMANQAKNWLPGPCYRQQRVSKTTNQNNNSNFAWTRATKYHLNGRDSLVNPGPAMATHKDDEDKFFPMSGVLIFGKQGAGNSNVDLDNVMITNEEEIKTTNPVATEEYGTVATNLQSANTAPATGTVNSQGALPGMVWQDRDVYLQGPIWAKIPHTDGHFHPSPLMGGFGLKHPPPQILIKNTPVPANPPTTFSPAKFASFITQYSTGQVSVEIEWELQKENSKRWNPEIQYTSNLCKSTNVDFAVDTNGVYSEPRPIGTRYLTRNL

SEQ ID NO: 824 - protein, 736 aa, synthetic construct
MAADGYLPDWLEDNLSEGIREWWDLKPGAPKPKANQQKQDDGRGLVLPGYKYLGPFNGLDKGEPVNAADAAALEHDKAYDQQLKAGDNPYLRYNHADAEFQERLQEDTSFGGNLGRAVFQAKKRVLEPLGLVEEGAKTAPGKKRPVEQSPQEPDSSSGIGKKGQQPARKRLNFGQTGDSESVPDPQPLGEPPAAPSGVGSNTMAAGGGAPMADNNEGADGVGNASGNWHCDSTWLGDRVITTSTRTWALPTYNNHLYKQISSQSGGSTNDNTYFGYSTPWGYFDFNRFHCHFSPRDWQRLINNNWGFRPKKLNFKLFNIQVKEVTTNDGTTTIANNLTSTVQVFGDSEYQLPYVLGSAHQGCLPPFPADVFMIPQYGYLTLNNGSQAVGRSSFYCLEYFPSQMLRTGNNFQFSYTFEDVPFHSSYAHSQSLDRLMNPLIDQYLYYLSRTQTTSGTAGNRTLQFSQAGPSSMANQAKNWLPGPCYRQQRVSKTTNQNNNSNIAWTRATKYHLNGRDSLVNPGPAMATHKDDEDKFFPMSGVLIFGKQGAGNSNVDLDNVMITNEEEIKTTNPVATEEYGTVATNLQSANTAPATGTVNSQGALPGMVWQDRDVYLQGPIWAKIPHTDGHFHPSPLMGGFGLKHPPPQILIKNTPVPANPPTTFSPAKFASFITQYSTGQVSVEIEWELQKENSKRWNPEIQYTSNLCKSTNVDFAVDTNGVYSEPRPIGTRYLTRNL

SEQ ID NO: 825 - protein, 736 aa, synthetic construct
MAADGYLPDWLEDNLSEGIREWWDLKPGAPKPKANQQKQDDGRGLVLPGYKYLGPFNGLDKGEPVNAADAAALEHDKAYDQQLKAGDNPYLRYNHADAEFQERLQEDTSFGGNLGRAVFQAKKRVLEPLGLVEEGAKTAPGKKRPVEQSPQEPDSSSGIGKKGQQPARKRLNFGQTGDSESVPDPQPLGEPPAAPSGVGSNTMAAGGGAPMADNNEGADGVGNASGNWHCDSTWLGDRVITTSTRTWALPTYNNHLYKQISSQSGGSTNDNTYFGYSTPWGYFDFNRFHCHFSPRDWQRLINNNWGFRPKKLNFKLFNIQVKEVTTNDGTTTIANNLTSTVQVFADSEYQLPYVLGSAHQGCLPPFPADVFMIPQYGYLTLNNGSQAVGRSSFYCLEYFPSQMLRTGNNFQFSYTFEDVPFHSSYAHSQSLDRLMNPLIDQYLYYLSRTQTTSGTAGNRTLQFSQAGPSSMANQAKNWLPGPCYRQQRVSKTTNQNNNSNFAWTGATKYHLNGRDSLVNPGPAMATHKDDEDKFFPMSGVLIFGKQGAGNSNVDLDNVMITNEEEIKTTNPVATEEYGTVATNLQSANTAPATGTVNSQGALPGMVWQDRDVYLQGPIWAKIPHTDGHFHPSPLMGGFGLKHPPPQILIKNTPVPANPPTTFSPAKFASFITQYSTGQVSVEIEWELQKENSKRWNPEIQYTSNLNKSTNVDFAVDTNGVYSEPRPIGTRYLTRNL

SEQ ID NO: 826 - protein, 736 aa, synthetic construct
MAADGYLPDWLEDNLSEGIREWWDLKPGAPKPKANQQKQDDGRGLVLPGYKYLGPFNGLDKGEPVNAADAAALEHDKAYDQQLKAGDNPYLRYNHADAEFQERLQEDTSFGGNLGRAVFQAKKRVLEPLGLVEEGAKTAPGKKRPVEQSPQEPDSSSGIGKKGQQPARKRLNFGQTGDSESVPDPQPLGEPPAAPSGVGSNTMAAGGGAPMADNNEGADGVGNASGNWHCDSTWLGDRVITTSTRTWALPTYNNHLYKQISSQSGGSTNDNTYFGYSTPWGYFDFNRFHCHFSPRDWQRLINNNWGFRPKKLNFKLFNIQVKEVTTNDGTTTIANNLTSTVQVFADSEYQLPYVLGSAHQGCLPPFPADVFMIPQYGYLTLNNGSQAVGRSSFYCLEYFPSQMLRTGNNFQFSYTFEDVPFHSSYAHSQSLDRLMNPLIDQYLYYLSRTQTTSGTAGNRTLQFSQAGPSSMANQAKNWLPGPCYRQQRVSKTTNQNNNSNIAWTGATKYHLNGRDSLVNPGPAMATHKDDEDKFFPMSGVLIFGKQGAGNSNVDLDNVMITNEEEIKTTNPVATEEYGTVATNLQSANTAPATGTVNSQGALPGMVWQDRDVYLQGPIWAKIPHTDGHFHPSPLMGGFGLKHPPPQILIKNTPVPANPPTTFSPAKFASFITQYSTGQVSVEIEWELQKENSKRWNPEIQYTSNLNKSTNVDFAVDTNGVYSEPRPIGTRYLTRNL

SEQ ID NO: 827 - protein, 736 aa, synthetic construct
MAADGYLPDWLEDNLSEGIREWWDLKPGAPKPKANQQKQDDGRGLVLPGYKYLGPFNGLDKGEPVNAADAAALEHDKAYDQQLKAGDNPYLRYNHADAEFQERLQEDTSFGGNLGRAVFQAKKRVLEPLGLVEEGAKTAPGKKRPVEQSPQEPDSSSGIGKKGQQPARKRLNFGQTGDSESVPDPQPLGEPPAAPSGVGSNTMAAGGGAPMADNNEGADGVGNASGNWHCDSTWLGDRVITTSTRTWALPTYNNHLYKQISSQSGGSTNDNTYFGYSTPWGYFDFNRFHCHFSPRDWQRLINNNWGFRPKKLNFKLFNIQVKEVTTNDGTTTIANNLTSTVQVFADSEYQLPYVLGSAHQGCLPPFPADVFMIPQYGYLTLNNGSQAVGRSSFYCLEYFPSQMLRTGNNFQFSYTFEDVPFHSSYAHSQSLDRLMNPLIDQYLYYLSRTQTTSGTAGNRTLQFSQAGPSSMANQAKNWLPGPCYRQQRVSKTTNQNNNSNFAWTRATKYHLNGRDSLVNPGPAMATHKDDEDKFFPMSGVLIFGKQGAGNSNVDLDNVMITNEEEIKTTNPVATEEYGTVATNLQSANTAPATGTVNSQGALPGMVWQDRDVYLQGPIWAKIPHTDGHFHPSPLMGGFGLKHPPPQILIKNTPVPANPPTTFSPAKFASFITQYSTGQVSVEIEWELQKENSKRWNPEIQYTSNLNKSTNVDFAVDTNGVYSEPRPIGTRYLTRNL

SEQ ID NO: 828 - protein, 736 aa, synthetic construct
MAADGYLPDWLEDNLSEGIREWWDLKPGAPKPKANQQKQDDGRGLVLPGYKYLGPFNGLDKGEPVNAADAAALEHDKAYDQQLKAGDNPYLRYNHADAEFQERLQEDTSFGGNLGRAVFQAKKRVLEPLGLVEEGAKTAPGKKRPVEQSPQEPDSSSGIGKKGQQPARKRLNFGQTGDSESVPDPQPLGEPPAAPSGVGSNTMAAGGGAPMADNNEGADGVGNASGNWHCDSTWLGDRVITTSTRTWALPTYNNHLYKQISSQSGGSTNDNTYFGYSTPWGYFDFNRFHCHFSPRDWQRLINNNWGFRPKKLNFKLFNIQVKEVTTNDGTTTIANNLTSTVQVFADSEYQLPYVLGSAHQGCLPPFPADVFMIPQYGYLTLNNGSQAVGRSSFYCLEYFPSQMLRTGNNFQFSYTFEDVPFHSSYAHSQSLDRLMNPLIDQYLYYLSRTQTTSGTAGNRTLQFSQAGPSSMANQAKNWLPGPCYRQQRVSKTTNQNNNSNFAWTGATKYHLNGRDSLVNPGPAMATHKDDEDKFFPMSGVLIFGKQGAGNSNVDLDNVMITNEEEIKTTNPVATEEYGTVATNLQSANTAPATGTVNSQGALPGMVWQDRDVYLQGPIWAKIPHTDGHFHPSPLMGGFGLKHPPPQILIKNTPVPANPPTTFSPAKFASFITQYSTGQVSVEIEWELQKENSKRWNPEIQYTSNLCKSTNVDFAVDTNGVYSEPRPIGTRYLTRNL

SEQ ID NO: 829 - protein, 736 aa, synthetic construct
MAADGYLPDWLEDNLSEGIREWWDLKPGAPKPKANQQKQDDGRGLVLPGYKYLGPFNGLDKGEPVNAADAAALEHDKAYDQQLKAGDNPYLRYNHADAEFQERLQEDTSFGGNLGRAVFQAKKRVLEPLGLVEEGAKTAPGKKRPVEQSPQEPDSSSGIGKKGQQPARKRLNFGQTGDSESVPDPQPLGEPPAAPSGVGSNTMAAGGGAPMADNNEGADGVGNASGNWHCDSTWLGDRVITTSTRTWALPTYNNHLYKQISSQSGGSTNDNTYFGYSTPWGYFDFNRFHCHFSPRDWQRLINNNWGFRPKKLNFKLFNIQVKEVTTNDGTTTIANNLTSTVQVFADSEYQLPYVLGSAHQGCLPPFPADVFMIPQYGYLTLNNGSQAVGRSSFYCLEYFPSQMLRTGNNFQFSYTFEDVPFHSSYAHSQSLDRLMNPLIDQYLYYLSRTQTTSGTAGNRTLQFSQAGPSSMANQAKNWLPGPCYRQQRVSKTTNQNNNSNIAWTRATKYHLNGRDSLVNPGPAMATHKDDEDKFFPMSGVLIFGKQGAGNSNVDLDNVMITNEEEIKTTNPVATEEYGTVATNLQSANTAPATGTVNSQGALPGMVWQDRDVYLQGPIWAKIPHTDGHFHPSPLMGGFGLKHPPPQILIKNTPVPANPPTTFSPAKFASFITQYSTGQVSVEIEWELQKENSKRWNPEIQYTSNLNKSTNVDFAVDTNGVYSEPRPIGTRYLTRNL

SEQ ID NO: 830 - protein, 736 aa, synthetic construct
MAADGYLPDWLEDNLSEGIREWWDLKPGAPKPKANQQKQDDGRGLVLPGYKYLGPFNGLDKGEPVNAADAAALEHDKAYDQQLKAGDNPYLRYNHADAEFQERLQEDTSFGGNLGRAVFQAKKRVLEPLGLVEEGAKTAPGKKRPVEQSPQEPDSSSGIGKKGQQPARKRLNFGQTGDSESVPDPQPLGEPPAAPSGVGSNTMAAGGGAPMADNNEGADGVGNASGNWHCDSTWLGDRVITTSTRTWALPTYNNHLYKQISSQSGGSTNDNTYFGYSTPWGYFDFNRFHCHFSPRDWQRLINNNWGFRPKKLNFKLFNIQVKEVTTNDGTTTIANNLTSTVQVFADSEYQLPYVLGSAHQGCLPPFPADVFMIPQYGYLTLNNGSQAVGRSSFYCLEYFPSQMLRTGNNFQFSYTFEDVPFHSSYAHSQSLDRLMNPLIDQYLYYLSRTQTTSGTAGNRTLQFSQAGPSSMANQAKNWLPGPCYRQQRVSKTTNQNNNSNIAWTGATKYHLNGRDSLVNPGPAMATHKDDEDKFFPMSGVLIFGKQGAGNSNVDLDNVMITNEEEIKTTNPVATEEYGTVATNLQSANTAPATGTVNSQGALPGMVWQDRDVYLQGPIWAKIPHTDGHFHPSPLMGGFGLKHPPPQILIKNTPVPANPPTTFSPAKFASFITQYSTGQVSVEIEWELQKENSKRWNPEIQYTSNLCKSTNVDFAVDTNGVYSEPRPIGTRYLTRNL

SEQ ID NO: 831 - protein, 736 aa, synthetic construct
MAADGYLPDWLEDNLSEGIREWWDLKPGAPKPKANQQKQDDGRGLVLPGYKYLGPFNGLDKGEPVNAADAAALEHDKAYDQQLKAGDNPYLRYNHADAEFQERLQEDTSFGGNLGRAVFQAKKRVLEPLGLVEEGAKTAPGKKRPVEQSPQEPDSSSGIGKKGQQPARKRLNFGQTGDSESVPDPQPLGEPPAAPSGVGSNTMAAGGGAPMADNNEGADGVGNASGNWHCDSTWLGDRVITTSTRTWALPTYNNHLYKQISSQSGGSTNDNTYFGYSTPWGYFDFNRFHCHFSPRDWQRLINNNWGFRPKKLNFKLFNIQVKEVTTNDGTTTIANNLTSTVQVFADSEYQLPYVLGSAHQGCLPPFPADVFMIPQYGYLTLNNGSQAVGRSSFYCLEYFPSQMLRTGNNFQFSYTFEDVPFHSSYAHSQSLDRLMNPLIDQYLYYLSRTQTTSGTAGNRTLQFSQAGPSSMANQAKNWLPGPCYRQQRVSKTTNQNNNSNFAWTRATKYHLNGRDSLVNPGPAMATHKDDEDKFFPMSGVLIFGKQGAGNSNVDLDNVMITNEEEIKTTNPVATEEYGTVATNLQSANTAPATGTVNSQGALPGMVWQDRDVYLQGPIWAKIPHTDGHFHPSPLMGGFGLKHPPPQILIKNTPVPANPPTTFSPAKFASFITQYSTGQVSVEIEWELQKENSKRWNPEIQYTSNLCKSTNVDFAVDTNGVYSEPRPIGTRYLTRNL

SEQ ID NO: 832 - protein, 736 aa, synthetic construct
MAADGYLPDWLEDNLSEGIREWWDLKPGAPKPKANQQKQDDGRGLVLPGYKYLGPFNGLDKGEPVNAADAAALEHDKAYDQQLKAGDNPYLRYNHADAEFQERLQEDTSFGGNLGRAVFQAKKRVLEPLGLVEEGAKTAPGKKRPVEQSPQEPDSSSGIGKKGQQPARKRLNFGQTGDSESVPDPQPLGEPPAAPSGVGSNTMAAGGGAPMADNNEGADGVGNASGNWHCDSTWLGDRVITTSTRTWALPTYNNHLYKQISSQSGGSTNDNTYFGYSTPWGYFDFNRFHCHFSPRDWQRLINNNWGFRPKKLNFKLFNIQVKEVTTNDGTTTIANNLTSTVQVFADSEYQLPYVLGSAHQGCLPPFPADVFMIPQYGYLTLNNGSQAVGRSSFYCLEYFPSQMLRTGNNFQFSYTFEDVPFHSSYAHSQSLDRLMNPLIDQYLYYLSRTQTTSGTAGNRTLQFSQAGPSSMANQAKNWLPGPCYRQQRVSKTTNQNNNSNIAWTRATKYHLNGRDSLVNPGPAMATHKDDEDKFFPMSGVLIFGKQGAGNSNVDLDNVMITNEEEIKTTNPVATEEYGTVATNLQSANTAPATGTVNSQGALPGMVWQDRDVYLQGPIWAKIPHTDGHFHPSPLMGGFGLKHPPPQILIKNTPVPANPPTTFSPAKFASFITQYSTGQVSVEIEWELQKENSKRWNPEIQYTSNLCKSTNVDFAVDTNGVYSEPRPIGTRYLTRNL

SEQ ID NO: 833 - protein, 737 aa, synthetic construct
MAADGYLPDWLEDTLSEGIRQWWKLKPGPPPPKPAERHKDDSRGLVLPGYKYLGPFNGLDKGEPVNEADAAALEHDKAYDRQLDSGDNPYLKYNHADAEFQERLKEDTSFGGNLGRAVFQAKKRLLEPLGLVEEAAKTAPGKKRPVEQSPQEPDSSSGIGKTGQQPAKKRLNFGQTGDTESVPDPQPIGEPPAAPSGVGSLTMASGGGAPVADNNEGADGVGSSSGNWHCDSQWLGDRVITTSTRTWALPTYNNHLYKQISNGTSGGATNDNTYFGYSTPWGYFDFNRFHCHFSPRDWQRLINNNWGFRPKRLSFKLFNIQVKEVTQNEGTKTIANNLTSTVQVFGDSEYQLPYVLGSAHQGCLPPFPADVFMIPQYGYLTLNNGSQAVGRSSFYCLEYFPSQMLRTGNNFQFTYTFEDVPFHSSYAHSQSLDRLMNPLIDQYLYYLSRTQTTGGTANTQTLGFSQGGPNTMANQAKNWLPGPCYRQQRVSTTTGQNNNSNFAWTAGTKYHLNGRNSLANPGIAMATHKDDKERFFPSNGILIFGKQNAARDNADYSDVMLTSEEEIKTTNPVATEEYGIVADNLQQQNTAPQIGTVNSQGALPGMVWQNRDVYLQGPIWAKIPHTDGNFHPSPLMGGFGLKHPPPQILIKNTPVPADPPTTFNQSKLNSFITQYSTGQVSVEIEWELQKENSKRWNPEIQYTSNYYKSTSVDFAVNTEGVYSEPHPIGTRYLTRPL

SEQ ID NO: 834 - protein, 737 aa, synthetic construct
MAADGYLPDWLEDTLSEGIRQWWKLKPGPPPPKPAERHKDDSRGLVLPGYKYLGPFNGLDKGEPVNEADAAALEHDKAYDRQLDSGDNPYLKYNHADAEFQERLKEDTSFGGNLGRAVFQAKKRLLEPLGLVEEAAKTAPGKKRPVEQSPQEPDSSSGIGKTGQQPAKKRLNFGQTGDTESVPDPQPIGEPPAAPSGVGSLTMASGGGAPVADNNEGADGVGSSSGNWHCDSQWLGDRVITTSTRTWALPTYNNHLYKQISNGTSGGATNDNTYFGYSTPWGYFDFNRFHCHFSPRDWQRLINNNWGFRPKRLSFKLFNIQVKEVTQNEGTKTIANNLTSTVQVFGDSEYQLPYVLGSAHQGCLPPFPADVFMIPQYGYLTLNNGSQAVGRSSFYCLEYFPSQMLRTGNNFQFTYTFEDVPFHSSYAHSQSLDRLMNPLIDQYLYYLSRTQTTGGTANTQTLGFSQGGPNTMANQAKNWLPGPCYRQQRVSTTTGQNNNSNIAWTAGTKYHLNGRNSLANPGIAMATHKDDKERFFPSNGILIFGKQNAARDNADYSDVMLTSEEEIKTTNPVATEEYGIVADNLQQQNTAPQIGTVNSQGALPGMVWQNRDVYLQGPIWAKIPHTDGNFHPSPLMGGFGLKHPPPQILIKNTPVPADPPTTFNQSKLNSFITQYSTGQVSVEIEWELQKENSKRWNPEIQYTSNYYKSTSVDFAVNTEGVYSEPHPIGTRYLTRPL

SEQ ID NO: 835 - protein, 737 aa, synthetic construct
MAADGYLPDWLEDTLSEGIRQWWKLKPGPPPPKPAERHKDDSRGLVLPGYKYLGPFNGLDKGEPVNEADAAALEHDKAYDRQLDSGDNPYLKYNHADAEFQERLKEDTSFGGNLGRAVFQAKKRLLEPLGLVEEAAKTAPGKKRPVEQSPQEPDSSSGIGKTGQQPAKKRLNFGQTGDTESVPDPQPIGEPPAAPSGVGSLTMASGGGAPVADNNEGADGVGSSSGNWHCDSQWLGDRVITTSTRTWALPTYNNHLYKQISNGTSGGATNDNTYFGYSTPWGYFDFNRFHCHFSPRDWQRLINNNWGFRPKRLSFKLFNIQVKEVTQNEGTKTIANNLTSTVQVFGDSEYQLPYVLGSAHQGCLPPFPADVFMIPQYGYLTLNNGSQAVGRSSFYCLEYFPSQMLRTGNNFQFTYTFEDVPFHSSYAHSQSLDRLMNPLIDQYLYYLSRTQTTGGTANTQTLGFSQGGPNTMANQAKNWLPGPCYRQQRVSTTTGQNNNSNFAWTRGTKYHLNGRNSLANPGIAMATHKDDKERFFPSNGILIFGKQNAARDNADYSDVMLTSEEEIKTTNPVATEEYGIVADNLQQQNTAPQIGTVNSQGALPGMVWQNRDVYLQGPIWAKIPHTDGNFHPSPLMGGFGLKHPPPQILIKNTPVPADPPTTFNQSKLNSFITQYSTGQVSVEIEWELQKENSKRWNPEIQYTSNYYKSTSVDFAVNTEGVYSEPHPIGTRYLTRPL

SEQ ID NO: 836 - protein, 737 aa, synthetic construct
MAADGYLPDWLEDTLSEGIRQWWKLKPGPPPPKPAERHKDDSRGLVLPGYKYLGPFNGLDKGEPVNEADAAALEHDKAYDRQLDSGDNPYLKYNHADAEFQERLKEDTSFGGNLGRAVFQAKKRLLEPLGLVEEAAKTAPGKKRPVEQSPQEPDSSSGIGKTGQQPAKKRLNFGQTGDTESVPDPQPIGEPPAAPSGVGSLTMASGGGAPVADNNEGADGVGSSSGNWHCDSQWLGDRVITTSTRTWALPTYNNHLYKQISNGTSGGATNDNTYFGYSTPWGYFDFNRFHCHFSPRDWQRLINNNWGFRPKRLSFKLFNIQVKEVTQNEGTKTIANNLTSTVQVFGDSEYQLPYVLGSAHQGCLPPFPADVFMIPQYGYLTLNNGSQAVGRSSFYCLEYFPSQMLRTGNNFQFTYTFEDVPFHSSYAHSQSLDRLMNPLIDQYLYYLSRTQTTGGTANTQTLGFSQGGPNTMANQAKNWLPGPCYRQQRVSTTTGQNNNSNFAWTAGTKYHLNGRNSLANPGIAMATHKDDKERFFPSNGILIFGKQNAARDNADYSDVMLTSEEEIKTTNPVATEEYGIVADNLQQQNTAPQIGTVNSQGALPGMVWQNRDVYLQGPIWAKIPHTDGNFHPSPLMGGFGLKHPPPQILIKNTPVPADPPTTFNQSKLNSFITQYSTGQVSVEIEWELQKENSKRWNPEIQYTSNYCKSTSVDFAVNTEGVYSEPHPIGTRYLTRPL

SEQ ID NO: 837 - protein, 737 aa, synthetic construct
MAADGYLPDWLEDTLSEGIRQWWKLKPGPPPPKPAERHKDDSRGLVLPGYKYLGPFNGLDKGEPVNEADAAALEHDKAYDRQLDSGDNPYLKYNHADAEFQERLKEDTSFGGNLGRAVFQAKKRLLEPLGLVEEAAKTAPGKKRPVEQSPQEPDSSSGIGKTGQQPAKKRLNFGQTGDTESVPDPQPIGEPPAAPSGVGSLTMASGGGAPVADNNEGADGVGSSSGNWHCDSQWLGDRVITTSTRTWALPTYNNHLYKQISNGTSGGATNDNTYFGYSTPWGYFDFNRFHCHFSPRDWQRLINNNWGFRPKRLSFKLFNIQVKEVTQNEGTKTIANNLTSTVQVFGDSEYQLPYVLGSAHQGCLPPFPADVFMIPQYGYLTLNNGSQAVGRSSFYCLEYFPSQMLRTGNNFQFTYTFEDVPFHSSYAHSQSLDRLMNPLIDQYLYYLSRTQTTGGTANTQTLGFSQGGPNTMANQAKNWLPGPCYRQQRVSTTTGQNNNSNIAWTRGTKYHLNGRNSLANPGIAMATHKDDKERFFPSNGILIFGKQNAARDNADYSDVMLTSEEEIKTTNPVATEEYGIVADNLQQQNTAPQIGTVNSQGALPGMVWQNRDVYLQGPIWAKIPHTDGNFHPSPLMGGFGLKHPPPQILIKNTPVPADPPTTFNQSKLNSFITQYSTGQVSVEIEWELQKENSKRWNPEIQYTSNYYKSTSVDFAVNTEGVYSEPHPIGTRYLTRPL

SEQ ID NO: 838 - protein, 737 aa, synthetic construct
MAADGYLPDWLEDTLSEGIRQWWKLKPGPPPPKPAERHKDDSRGLVLPGYKYLGPFNGLDKGEPVNEADAAALEHDKAYDRQLDSGDNPYLKYNHADAEFQERLKEDTSFGGNLGRAVFQAKKRLLEPLGLVEEAAKTAPGKKRPVEQSPQEPDSSSGIGKTGQQPAKKRLNFGQTGDTESVPDPQPIGEPPAAPSGVGSLTMASGGGAPVADNNEGADGVGSSSGNWHCDSQWLGDRVITTSTRTWALPTYNNHLYKQISNGTSGGATNDNTYFGYSTPWGYFDFNRFHCHFSPRDWQRLINNNWGFRPKRLSFKLFNIQVKEVTQNEGTKTIANNLTSTVQVFGDSEYQLPYVLGSAHQGCLPPFPADVFMIPQYGYLTLNNGSQAVGRSSFYCLEYFPSQMLRTGNNFQFTYTFEDVPFHSSYAHSQSLDRLMNPLIDQYLYYLSRTQTTGGTANTQTLGFSQGGPNTMANQAKNWLPGPCYRQQRVSTTTGQNNNSNIAWTAGTKYHLNGRNSLANPGIAMATHKDDKERFFPSNGILIFGKQNAARDNADYSDVMLTSEEEIKTTNPVATEEYGIVADNLQQQNTAPQIGTVNSQGALPGMVWQNRDVYLQGPIWAKIPHTDGNFHPSPLMGGFGLKHPPPQILIKNTPVPADPPTTFNQSKLNSFITQYSTGQVSVEIEWELQKENSKRWNPEIQYTSNYCKSTSVDFAVNTEGVYSEPHPIGTRYLTRPL

SEQ ID NO: 839 - protein, 737 aa, synthetic construct
MAADGYLPDWLEDTLSEGIRQWWKLKPGPPPPKPAERHKDDSRGLVLPGYKYLGPFNGLDKGEPVNEADAAALEHDKAYDRQLDSGDNPYLKYNHADAEFQERLKEDTSFGGNLGRAVFQAKKRLLEPLGLVEEAAKTAPGKKRPVEQSPQEPDSSSGIGKTGQQPAKKRLNFGQTGDTESVPDPQPIGEPPAAPSGVGSLTMASGGGAPVADNNEGADGVGSSSGNWHCDSQWLGDRVITTSTRTWALPTYNNHLYKQISNGTSGGATNDNTYFGYSTPWGYFDFNRFHCHFSPRDWQRLINNNWGFRPKRLSFKLFNIQVKEVTQNEGTKTIANNLTSTVQVFGDSEYQLPYVLGSAHQGCLPPFPADVFMIPQYGYLTLNNGSQAVGRSSFYCLEYFPSQMLRTGNNFQFTYTFEDVPFHSSYAHSQSLDRLMNPLIDQYLYYLSRTQTTGGTANTQTLGFSQGGPNTMANQAKNWLPGPCYRQQRVSTTTGQNNNSNFAWTRGTKYHLNGRNSLANPGIAMATHKDDKERFFPSNGILIFGKQNAARDNADYSDVMLTSEEEIKTTNPVATEEYGIVADNLQQQNTAPQIGTVNSQGALPGMVWQNRDVYLQGPIWAKIPHTDGNFHPSPLMGGFGLKHPPPQILIKNTPVPADPPTTFNQSKLNSFITQYSTGQVSVEIEWELQKENSKRWNPEIQYTSNYCKSTSVDFAVNTEGVYSEPHPIGTRYLTRPL

SEQ ID NO: 840 - protein, 737 aa, synthetic construct
MAADGYLPDWLEDTLSEGIRQWWKLKPGPPPPKPAERHKDDSRGLVLPGYKYLGPFNGLDKGEPVNEADAAALEHDKAYDRQLDSGDNPYLKYNHADAEFQERLKEDTSFGGNLGRAVFQAKKRLLEPLGLVEEAAKTAPGKKRPVEQSPQEPDSSSGIGKTGQQPAKKRLNFGQTGDTESVPDPQPIGEPPAAPSGVGSLTMASGGGAPVADNNEGADGVGSSSGNWHCDSQWLGDRVITTSTRTWALPTYNNHLYKQISNGTSGGATNDNTYFGYSTPWGYFDFNRFHCHFSPRDWQRLINNNWGFRPKRLSFKLFNIQVKEVTQNEGTKTIANNLTSTVQVFGDSEYQLPYVLGSAHQGCLPPFPADVFMIPQYGYLTLNNGSQAVGRSSFYCLEYFPSQMLRTGNNFQFTYTFEDVPFHSSYAHSQSLDRLMNPLIDQYLYYLSRTQTTGGTANTQTLGFSQGGPNTMANQAKNWLPGPCYRQQRVSTTTGQNNNSNIAWTRGTKYHLNGRNSLANPGIAMATHKDDKERFFPSNGILIFGKQNAARDNADYSDVMLTSEEEIKTTNPVATEEYGIVADNLQQQNTAPQIGTVNSQGALPGMVWQNRDVYLQGPIWAKIPHTDGNFHPSPLMGGFGLKHPPPQILIKNTPVPADPPTTFNQSKLNSFITQYSTGQVSVEIEWELQKENSKRWNPEIQYTSNYCKSTSVDFAVNTEGVYSEPHPIGTRYLTRPL

SEQ ID NO: 841 - protein, 737 aa, synthetic construct
MAADGYLPDWLEDTLSEGIRQWWKLKPGPPPPKPAERHKDDSRGLVLPGYKYLGPFNGLDKGEPVNEADAAALEHDKAYDRQLDSGDNPYLKYNHADAEFQERLKEDTSFGGNLGRAVFQAKKRLLEPLGLVEEAAKTAPGKKRPVEQSPQEPDSSSGIGKTGQQPAKKRLNFGQTGDTESVPDPQPIGEPPAAPSGVGSLTMASGGGAPVADNNEGADGVGSSSGNWHCDSQWLGDRVITTSTRTWALPTYNNHLYKQISNGTSGGATNDNTYFGYSTPWGYFDFNRFHCHFSPRDWQRLINNNWGFRPKRLSFKLFNIQVKEVTQNEGTKTIANNLTSTVQVFTDSEYQLPYVLGSAHQGCLPPFPADVFMIPQYGYLTLNNGSQAVGRSSFYCLEYFPSQMLRTGNNFQFTYTFEDVPFHSSYAHSQSLDRLMNPLIDQYLYYLSRTQTTGGTANTQTLGFSQGGPNTMANQAKNWLPGPCYRQQRVSTTTGQNNNSNFAWTAGTKYHLNGRNSLANPGIAMATHKDDKERFFPSNGILIFGKQNAARDNADYSDVMLTSEEEIKTTNPVATEEYGIVADNLQQQNTAPQIGTVNSQGALPGMVWQNRDVYLQGPIWAKIPHTDGNFHPSPLMGGFGLKHPPPQILIKNTPVPADPPTTFNQSKLNSFITQYSTGQVSVEIEWELQKENSKRWNPEIQYTSNLYKSTSVDFAVNTEGVYSEPHPIGTRYLTRPL

SEQ ID NO: 842 - protein, 737 aa, synthetic construct
MAADGYLPDWLEDTLSEGIRQWWKLKPGPPPPKPAERHKDDSRGLVLPGYKYLGPFNGLDKGEPVNEADAAALEHDKAYDRQLDSGDNPYLKYNHADAEFQERLKEDTSFGGNLGRAVFQAKKRLLEPLGLVEEAAKTAPGKKRPVEQSPQEPDSSSGIGKTGQQPAKKRLNFGQTGDTESVPDPQPIGEPPAAPSGVGSLTMASGGGAPVADNNEGADGVGSSSGNWHCDSQWLGDRVITTSTRTWALPTYNNHLYKQISNGTSGGATNDNTYFGYSTPWGYFDFNRFHCHFSPRDWQRLINNNWGFRPKRLSFKLFNIQVKEVTQNEGTKTIANNLTSTVQVFTDSEYQLPYVLGSAHQGCLPPFPADVFMIPQYGYLTLNNGSQAVGRSSFYCLEYFPSQMLRTGNNFQFTYTFEDVPFHSSYAHSQSLDRLMNPLIDQYLYYLSRTQTTGGTANTQTLGFSQGGPNTMANQAKNWLPGPCYRQQRVSTTTGQNNNSNIAWTAGTKYHLNGRNSLANPGIAMATHKDDKERFFPSNGILIFGKQNAARDNADYSDVMLTSEEEIKTTNPVATEEYGIVADNLQQQNTAPQIGTVNSQGALPGMVWQNRDVYLQGPIWAKIPHTDGNFHPSPLMGGFGLKHPPPQILIKNTPVPADPPTTFNQSKLNSFITQYSTGQVSVEIEWELQKENSKRWNPEIQYTSNLYKSTSVDFAVNTEGVYSEPHPIGTRYLTRPL

SEQ ID NO: 843 - protein, 737 aa, synthetic construct
MAADGYLPDWLEDTLSEGIRQWWKLKPGPPPPKPAERHKDDSRGLVLPGYKYLGPFNGLDKGEPVNEADAAALEHDKAYDRQLDSGDNPYLKYNHADAEFQERLKEDTSFGGNLGRAVFQAKKRLLEPLGLVEEAAKTAPGKKRPVEQSPQEPDSSSGIGKTGQQPAKKRLNFGQTGDTESVPDPQPIGEPPAAPSGVGSLTMASGGGAPVADNNEGADGVGSSSGNWHCDSQWLGDRVITTSTRTWALPTYNNHLYKQISNGTSGGATNDNTYFGYSTPWGYFDFNRFHCHFSPRDWQRLINNNWGFRPKRLSFKLFNIQVKEVTQNEGTKTIANNLTSTVQVFTDSEYQLPYVLGSAHQGCLPPFPADVFMIPQYGYLTLNNGSQAVGRSSFYCLEYFPSQMLRTGNNFQFTYTFEDVPFHSSYAHSQSLDRLMNPLIDQYLYYLSRTQTTGGTANTQTLGFSQGGPNTMANQAKNWLPGPCYRQQRVSTTTGQNNNSNFAWTRGTKYHLNGRNSLANPGIAMATHKDDKERFFPSNGILIFGKQNAARDNADYSDVMLTSEEEIKTTNPVATEEYGIVADNLQQQNTAPQIGTVNSQGALPGMVWQNRDVYLQGPIWAKIPHTDGNFHPSPLMGGFGLKHPPPQILIKNTPVPADPPTTFNQSKLNSFITQYSTGQVSVEIEWELQKENSKRWNPEIQYTSNLYKSTSVDFAVNTEGVYSEPHPIGTRYLTRPL

SEQ ID NO: 844 - protein, 737 aa, synthetic construct
MAADGYLPDWLEDTLSEGIRQWWKLKPGPPPPKPAERHKDDSRGLVLPGYKYLGPFNGLDKGEPVNEADAAALEHDKAYDRQLDSGDNPYLKYNHADAEFQERLKEDTSFGGNLGRAVFQAKKRLLEPLGLVEEAAKTAPGKKRPVEQSPQEPDSSSGIGKTGQQPAKKRLNFGQTGDTESVPDPQPIGEPPAAPSGVGSLTMASGGGAPVADNNEGADGVGSSSGNWHCDSQWLGDRVITTSTRTWALPTYNNHLYKQISNGTSGGATNDNTYFGYSTPWGYFDFNRFHCHFSPRDWQRLINNNWGFRPKRLSFKLFNIQVKEVTQNEGTKTIANNLTSTVQVFTDSEYQLPYVLGSAHQGCLPPFPADVFMIPQYGYLTLNNGSQAVGRSSFYCLEYFPSQMLRTGNNFQFTYTFEDVPFHSSYAHSQSLDRLMNPLIDQYLYYLSRTQTTGGTANTQTLGFSQGGPNTMANQAKNWLPGPCYRQQRVSTTTGQNNNSNFAWTAGTKYHLNGRNSLANPGIAMATHKDDKERFFPSNGILIFGKQNAARDNADYSDVMLTSEEEIKTTNPVATEEYGIVADNLQQQNTAPQIGTVNSQGALPGMVWQNRDVYLQGPIWAKIPHTDGNFHPSPLMGGFGLKHPPPQILIKNTPVPADPPTTFNQSKLNSFITQYSTGQVSVEIEWELQKENSKRWNPEIQYTSNLCKSTSVDFAVNTEGVYSEPHPIGTRYLTRPL

SEQ ID NO: 845 - protein, 737 aa, synthetic construct
MAADGYLPDWLEDTLSEGIRQWWKLKPGPPPPKPAERHKDDSRGLVLPGYKYLGPFNGLDKGEPVNEADAAALEHDKAYDRQLDSGDNPYLKYNHADAEFQERLKEDTSFGGNLGRAVFQAKKRLLEPLGLVEEAAKTAPGKKRPVEQSPQEPDSSSGIGKTGQQPAKKRLNFGQTGDTESVPDPQPIGEPPAAPSGVGSLTMASGGGAPVADNNEGADGVGSSSGNWHCDSQWLGDRVITTSTRTWALPTYNNHLYKQISNGTSGGATNDNTYFGYSTPWGYFDFNRFHCHFSPRDWQRLINNNWGFRPKRLSFKLFNIQVKEVTQNEGTKTIANNLTSTVQVFTDSEYQLPYVLGSAHQGCLPPFPADVFMIPQYGYLTLNNGSQAVGRSSFYCLEYFPSQMLRTGNNFQFTYTFEDVPFHSSYAHSQSLDRLMNPLIDQYLYYLSRTQTTGGTANTQTLGFSQGGPNTMANQAKNWLPGPCYRQQRVSTTTGQNNNSNIAWTRGTKYHLNGRNSLANPGIAMATHKDDKERFFPSNGILIFGKQNAARDNADYSDVMLTSEEEIKTTNPVATEEYGIVADNLQQQNTAPQIGTVNSQGALPGMVWQNRDVYLQGPIWAKIPHTDGNFHPSPLMGGFGLKHPPPQILIKNTPVPADPPTTFNQSKLNSFITQYSTGQVSVEIEWELQKENSKRWNPEIQYTSNLYKSTSVDFAVNTEGVYSEPHPIGTRYLTRPL

SEQ ID NO: 846 - protein, 737 aa, synthetic construct
MAADGYLPDWLEDTLSEGIRQWWKLKPGPPPPKPAERHKDDSRGLVLPGYKYLGPFNGLDKGEPVNEADAAALEHDKAYDRQLDSGDNPYLKYNHADAEFQERLKEDTSFGGNLGRAVFQAKKRLLEPLGLVEEAAKTAPGKKRPVEQSPQEPDSSSGIGKTGQQPAKKRLNFGQTGDTESVPDPQPIGEPPAAPSGVGSLTMASGGGAPVADNNEGADGVGSSSGNWHCDSQWLGDRVITTSTRTWALPTYNNHLYKQISNGTSGGATNDNTYFGYSTPWGYFDFNRFHCHFSPRDWQRLINNNWGFRPKRLSFKLFNIQVKEVTQNEGTKTIANNLTSTVQVFTDSEYQLPYVLGSAHQGCLPPFPADVFMIPQYGYLTLNNGSQAVGRSSFYCLEYFPSQMLRTGNNFQFTYTFEDVPFHSSYAHSQSLDRLMNPLIDQYLYYLSRTQTTGGTANTQTLGFSQGGPNTMANQAKNWLPGPCYRQQRVSTTTGQNNNSNIAWTAGTKYHLNGRNSLANPGIAMATHKDDKERFFPSNGILIFGKQNAARDNADYSDVMLTSEEEIKTTNPVATEEYGIVADNLQQQNTAPQIGTVNSQGALPGMVWQNRDVYLQGPIWAKIPHTDGNFHPSPLMGGFGLKHPPPQILIKNTPVPADPPTTFNQSKLNSFITQYSTGQVSVEIEWELQKENSKRWNPEIQYTSNLCKSTSVDFAVNTEGVYSEPHPIGTRYLTRPL

SEQ ID NO: 847 - protein, 737 aa, synthetic construct
MAADGYLPDWLEDTLSEGIRQWWKLKPGPPPPKPAERHKDDSRGLVLPGYKYLGPFNGLDKGEPVNEADAAALEHDKAYDRQLDSGDNPYLKYNHADAEFQERLKEDTSFGGNLGRAVFQAKKRLLEPLGLVEEAAKTAPGKKRPVEQSPQEPDSSSGIGKTGQQPAKKRLNFGQTGDTESVPDPQPIGEPPAAPSGVGSLTMASGGGAPVADNNEGADGVGSSSGNWHCDSQWLGDRVITTSTRTWALPTYNNHLYKQISNGTSGGATNDNTYFGYSTPWGYFDFNRFHCHFSPRDWQRLINNNWGFRPKRLSFKLFNIQVKEVTQNEGTKTIANNLTSTVQVFTDSEYQLPYVLGSAHQGCLPPFPADVFMIPQYGYLTLNNGSQAVGRSSFYCLEYFPSQMLRTGNNFQFTYTFEDVPFHSSYAHSQSLDRLMNPLIDQYLYYLSRTQTTGGTANTQTLGFSQGGPNTMANQAKNWLPGPCYRQQRVSTTTGQNNNSNFAWTRGTKYHLNGRNSLANPGIAMATHKDDKERFFPSNGILIFGKQNAARDNADYSDVMLTSEEEIKTTNPVATEEYGIVADNLQQQNTAPQIGTVNSQGALPGMVWQNRDVYLQGPIWAKIPHTDGNFHPSPLMGGFGLKHPPPQILIKNTPVPADPPTTFNQSKLNSFITQYSTGQVSVEIEWELQKENSKRWNPEIQYTSNLCKSTSVDFAVNTEGVYSEPHPIGTRYLTRPL

SEQ ID NO: 848 - protein, 737 aa, synthetic construct
MAADGYLPDWLEDTLSEGIRQWWKLKPGPPPPKPAERHKDDSRGLVLPGYKYLGPFNGLDKGEPVNEADAAALEHDKAYDRQLDSGDNPYLKYNHADAEFQERLKEDTSFGGNLGRAVFQAKKRLLEPLGLVEEAAKTAPGKKRPVEQSPQEPDSSSGIGKTGQQPAKKRLNFGQTGDTESVPDPQPIGEPPAAPSGVGSLTMASGGGAPVADNNEGADGVGSSSGNWHCDSQWLGDRVITTSTRTWALPTYNNHLYKQISNGTSGGATNDNTYFGYSTPWGYFDFNRFHCHFSPRDWQRLINNNWGFRPKRLSFKLFNIQVKEVTQNEGTKTIANNLTSTVQVFTDSEYQLPYVLGSAHQGCLPPFPADVFMIPQYGYLTLNNGSQAVGRSSFYCLEYFPSQMLRTGNNFQFTYTFEDVPFHSSYAHSQSLDRLMNPLIDQYLYYLSRTQTTGGTANTQTLGFSQGGPNTMANQAKNWLPGPCYRQQRVSTTTGQNNNSNIAWTRGTKYHLNGRNSLANPGIAMATHKDDKERFFPSNGILIFGKQNAARDNADYSDVMLTSEEEIKTTNPVATEEYGIVADNLQQQNTAPQIGTVNSQGALPGMVWQNRDVYLQGPIWAKIPHTDGNFHPSPLMGGFGLKHPPPQILIKNTPVPADPPTTFNQSKLNSFITQYSTGQVSVEIEWELQKENSKRWNPEIQYTSNLCKSTSVDFAVNTEGVYSEPHPIGTRYLTRPL

SEQ ID NO: 849 - protein, 737 aa, synthetic construct
MAADGYLPDWLEDTLSEGIRQWWKLKPGPPPPKPAERHKDDSRGLVLPGYKYLGPFNGLDKGEPVNEADAAALEHDKAYDRQLDSGDNPYLKYNHADAEFQERLKEDTSFGGNLGRAVFQAKKRLLEPLGLVEEAAKTAPGKKRPVEQSPQEPDSSSGIGKTGQQPAKKRLNFGQTGDTESVPDPQPIGEPPAAPSGVGSLTMASGGGAPVADNNEGADGVGSSSGNWHCDSQWLGDRVITTSTRTWALPTYNNHLYKQISNGTSGGATNDNTYFGYSTPWGYFDFNRFHCHFSPRDWQRLINNNWGFRPKRLSFKLFNIQVKEVTQNEGTKTIANNLTSTVQVFGDSEYQLPYVLGSAHQGCLPPFPADVFMIPQYGYLTLNNGSQAVGRSSFYCLEYFPSQMLRTGNNFQFTYTFEDVPFHSSYAHSQSLDRLMNPLIDQYLYYLSRTQTTGGTANTQTLGFSQGGPNTMANQAKNWLPGPCYRQQRVSTTTGQNNNSNFAWTAGTKYHLNGRNSLANPGIAMATHKDDKERFFPSNGILIFGKQNAARDNADYSDVMLTSEEEIKTTNPVATEEYGIVADNLQQQNTAPQIGTVNSQGALPGMVWQNRDVYLQGPIWAKIPHTDGNFHPSPLMGGFGLKHPPPQILIKNTPVPADPPTTFNQSKLNSFITQYSTGQVSVEIEWELQKENSKRWNPEIQYTSNLYKSTSVDFAVNTEGVYSEPHPIGTRYLTRPL

SEQ ID NO: 850 - protein, 737 aa, synthetic construct
MAADGYLPDWLEDTLSEGIRQWWKLKPGPPPPKPAERHKDDSRGLVLPGYKYLGPFNGLDKGEPVNEADAAALEHDKAYDRQLDSGDNPYLKYNHADAEFQERLKEDTSFGGNLGRAVFQAKKRLLEPLGLVEEAAKTAPGKKRPVEQSPQEPDSSSGIGKTGQQPAKKRLNFGQTGDTESVPDPQPIGEPPAAPSGVGSLTMASGGGAPVADNNEGADGVGSSSGNWHCDSQWLGDRVITTSTRTWALPTYNNHLYKQISNGTSGGATNDNTYFGYSTPWGYFDFNRFHCHFSPRDWQRLINNNWGFRPKRLSFKLFNIQVKEVTQNEGTKTIANNLTSTVQVFGDSEYQLPYVLGSAHQGCLPPFPADVFMIPQYGYLTLNNGSQAVGRSSFYCLEYFPSQMLRTGNNFQFTYTFEDVPFHSSYAHSQSLDRLMNPLIDQYLYYLSRTQTTGGTANTQTLGFSQGGPNTMANQAKNWLPGPCYRQQRVSTTTGQNNNSNIAWTAGTKYHLNGRNSLANPGIAMATHKDDKERFFPSNGILIFGKQNAARDNADYSDVMLTSEEEIKTTNPVATEEYGIVADNLQQQNTAPQIGTVNSQGALPGMVWQNRDVYLQGPIWAKIPHTDGNFHPSPLMGGFGLKHPPPQILIKNTPVPADPPTTFNQSKLNSFITQYSTGQVSVEIEWELQKENSKRWNPEIQYTSNLYKSTSVDFAVNTEGVYSEPHPIGTRYLTRPL

SEQ ID NO: 851 - protein, 737 aa, synthetic construct
MAADGYLPDWLEDTLSEGIRQWWKLKPGPPPPKPAERHKDDSRGLVLPGYKYLGPFNGLDKGEPVNEADAAALEHDKAYDRQLDSGDNPYLKYNHADAEFQERLKEDTSFGGNLGRAVFQAKKRLLEPLGLVEEAAKTAPGKKRPVEQSPQEPDSSSGIGKTGQQPAKKRLNFGQTGDTESVPDPQPIGEPPAAPSGVGSLTMASGGGAPVADNNEGADGVGSSSGNWHCDSQWLGDRVITTSTRTWALPTYNNHLYKQISNGTSGGATNDNTYFGYSTPWGYFDFNRFHCHFSPRDWQRLINNNWGFRPKRLSFKLFNIQVKEVTQNEGTKTIANNLTSTVQVFGDSEYQLPYVLGSAHQGCLPPFPADVFMIPQYGYLTLNNGSQAVGRSSFYCLEYFPSQMLRTGNNFQFTYTFEDVPFHSSYAHSQSLDRLMNPLIDQYLYYLSRTQTTGGTANTQTLGFSQGGPNTMANQAKNWLPGPCYRQQRVSTTTGQNNNSNFAWTRGTKYHLNGRNSLANPGIAMATHKDDKERFFPSNGILIFGKQNAARDNADYSDVMLTSEEEIKTTNPVATEEYGIVADNLQQQNTAPQIGTVNSQGALPGMVWQNRDVYLQGPIWAKIPHTDGNFHPSPLMGGFGLKHPPPQILIKNTPVPADPPTTFNQSKLNSFITQYSTGQVSVEIEWELQKENSKRWNPEIQYTSNLYKSTSVDFAVNTEGVYSEPHPIGTRYLTRPL

SEQ ID NO: 852 - protein, 737 aa, synthetic construct
MAADGYLPDWLEDTLSEGIRQWWKLKPGPPPPKPAERHKDDSRGLVLPGYKYLGPFNGLDKGEPVNEADAAALEHDKAYDRQLDSGDNPYLKYNHADAEFQERLKEDTSFGGNLGRAVFQAKKRLLEPLGLVEEAAKTAPGKKRPVEQSPQEPDSSSGIGKTGQQPAKKRLNFGQTGDTESVPDPQPIGEPPAAPSGVGSLTMASGGGAPVADNNEGADGVGSSSGNWHCDSQWLGDRVITTSTRTWALPTYNNHLYKQISNGTSGGATNDNTYFGYSTPWGYFDFNRFHCHFSPRDWQRLINNNWGFRPKRLSFKLFNIQVKEVTQNEGTKTIANNLTSTVQVFGDSEYQLPYVLGSAHQGCLPPFPADVFMIPQYGYLTLNNGSQAVGRSSFYCLEYFPSQMLRTGNNFQFTYTFEDVPFHSSYAHSQSLDRLMNPLIDQYLYYLSRTQTTGGTANTQTLGFSQGGPNTMANQAKNWLPGPCYRQQRVSTTTGQNNNSNFAWTAGTKYHLNGRNSLANPGIAMATHKDDKERFFPSNGILIFGKQNAARDNADYSDVMLTSEEEIKTTNPVATEEYGIVADNLQQQNTAPQIGTVNSQGALPGMVWQNRDVYLQGPIWAKIPHTDGNFHPSPLMGGFGLKHPPPQILIKNTPVPADPPTTFNQSKLNSFITQYSTGQVSVEIEWELQKENSKRWNPEIQYTSNLCKSTSVDFAVNTEGVYSEPHPIGTRYLTRPL

SEQ ID NO: 853 - protein, 737 aa, synthetic construct
MAADGYLPDWLEDTLSEGIRQWWKLKPGPPPPKPAERHKDDSRGLVLPGYKYLGPFNGLDKGEPVNEADAAALEHDKAYDRQLDSGDNPYLKYNHADAEFQERLKEDTSFGGNLGRAVFQAKKRLLEPLGLVEEAAKTAPGKKRPVEQSPQEPDSSSGIGKTGQQPAKKRLNFGQTGDTESVPDPQPIGEPPAAPSGVGSLTMASGGGAPVADNNEGADGVGSSSGNWHCDSQWLGDRVITTSTRTWALPTYNNHLYKQISNGTSGGATNDNTYFGYSTPWGYFDFNRFHCHFSPRDWQRLINNNWGFRPKRLSFKLFNIQVKEVTQNEGTKTIANNLTSTVQVFGDSEYQLPYVLGSAHQGCLPPFPADVFMIPQYGYLTLNNGSQAVGRSSFYCLEYFPSQMLRTGNNFQFTYTFEDVPFHSSYAHSQSLDRLMNPLIDQYLYYLSRTQTTGGTANTQTLGFSQGGPNTMANQAKNWLPGPCYRQQRVSTTTGQNNNSNIAWTRGTKYHLNGRNSLANPGIAMATHKDDKERFFPSNGILIFGKQNAARDNADYSDVMLTSEEEIKTTNPVATEEYGIVADNLQQQNTAPQIGTVNSQGALPGMVWQNRDVYLQGPIWAKIPHTDGNFHPSPLMGGFGLKHPPPQILIKNTPVPADPPTTFNQSKLNSFITQYSTGQVSVEIEWELQKENSKRWNPEIQYTSNLYKSTSVDFAVNTEGVYSEPHPIGTRYLTRPL

SEQ ID NO: 854 - protein, 737 aa, synthetic construct
MAADGYLPDWLEDTLSEGIRQWWKLKPGPPPPKPAERHKDDSRGLVLPGYKYLGPFNGLDKGEPVNEADAAALEHDKAYDRQLDSGDNPYLKYNHADAEFQERLKEDTSFGGNLGRAVFQAKKRLLEPLGLVEEAAKTAPGKKRPVEQSPQEPDSSSGIGKTGQQPAKKRLNFGQTGDTESVPDPQPIGEPPAAPSGVGSLTMASGGGAPVADNNEGADGVGSSSGNWHCDSQWLGDRVITTSTRTWALPTYNNHLYKQISNGTSGGATNDNTYFGYSTPWGYFDFNRFHCHFSPRDWQRLINNNWGFRPKRLSFKLFNIQVKEVTQNEGTKTIANNLTSTVQVFGDSEYQLPYVLGSAHQGCLPPFPADVFMIPQYGYLTLNNGSQAVGRSSFYCLEYFPSQMLRTGNNFQFTYTFEDVPFHSSYAHSQSLDRLMNPLIDQYLYYLSRTQTTGGTANTQTLGFSQGGPNTMANQAKNWLPGPCYRQQRVSTTTGQNNNSNIAWTAGTKYHLNGRNSLANPGIAMATHKDDKERFFPSNGILIFGKQNAARDNADYSDVMLTSEEEIKTTNPVATEEYGIVADNLQQQNTAPQIGTVNSQGALPGMVWQNRDVYLQGPIWAKIPHTDGNFHPSPLMGGFGLKHPPPQILIKNTPVPADPPTTFNQSKLNSFITQYSTGQVSVEIEWELQKENSKRWNPEIQYTSNLCKSTSVDFAVNTEGVYSEPHPIGTRYLTRPL

SEQ ID NO: 855 - protein, 737 aa, synthetic construct
MAADGYLPDWLEDTLSEGIRQWWKLKPGPPPPKPAERHKDDSRGLVLPGYKYLGPFNGLDKGEPVNEADAAALEHDKAYDRQLDSGDNPYLKYNHADAEFQERLKEDTSFGGNLGRAVFQAKKRLLEPLGLVEEAAKTAPGKKRPVEQSPQEPDSSSGIGKTGQQPAKKRLNFGQTGDTESVPDPQPIGEPPAAPSGVGSLTMASGGGAPVADNNEGADGVGSSSGNWHCDSQWLGDRVITTSTRTWALPTYNNHLYKQISNGTSGGATNDNTYFGYSTPWGYFDFNRFHCHFSPRDWQRLINNNWGFRPKRLSFKLFNIQVKEVTQNEGTKTIANNLTSTVQVFGDSEYQLPYVLGSAHQGCLPPFPADVFMIPQYGYLTLNNGSQAVGRSSFYCLEYFPSQMLRTGNNFQFTYTFEDVPFHSSYAHSQSLDRLMNPLIDQYLYYLSRTQTTGGTANTQTLGFSQGGPNTMANQAKNWLPGPCYRQQRVSTTTGQNNNSNFAWTRGTKYHLNGRNSLANPGIAMATHKDDKERFFPSNGILIFGKQNAARDNADYSDVMLTSEEEIKTTNPVATEEYGIVADNLQQQNTAPQIGTVNSQGALPGMVWQNRDVYLQGPIWAKIPHTDGNFHPSPLMGGFGLKHPPPQILIKNTPVPADPPTTFNQSKLNSFITQYSTGQVSVEIEWELQKENSKRWNPEIQYTSNLCKSTSVDFAVNTEGVYSEPHPIGTRYLTRPL

SEQ ID NO: 856 - protein, 737 aa, synthetic construct
MAADGYLPDWLEDTLSEGIRQWWKLKPGPPPPKPAERHKDDSRGLVLPGYKYLGPFNGLDKGEPVNEADAAALEHDKAYDRQLDSGDNPYLKYNHADAEFQERLKEDTSFGGNLGRAVFQAKKRLLEPLGLVEEAAKTAPGKKRPVEQSPQEPDSSSGIGKTGQQPAKKRLNFGQTGDTESVPDPQPIGEPPAAPSGVGSLTMASGGGAPVADNNEGADGVGSSSGNWHCDSQWLGDRVITTSTRTWALPTYNNHLYKQISNGTSGGATNDNTYFGYSTPWGYFDFNRFHCHFSPRDWQRLINNNWGFRPKRLSFKLFNIQVKEVTQNEGTKTIANNLTSTVQVFGDSEYQLPYVLGSAHQGCLPPFPADVFMIPQYGYLTLNNGSQAVGRSSFYCLEYFPSQMLRTGNNFQFTYTFEDVPFHSSYAHSQSLDRLMNPLIDQYLYYLSRTQTTGGTANTQTLGFSQGGPNTMANQAKNWLPGPCYRQQRVSTTTGQNNNSNIAWTRGTKYHLNGRNSLANPGIAMATHKDDKERFFPSNGILIFGKQNAARDNADYSDVMLTSEEEIKTTNPVATEEYGIVADNLQQQNTAPQIGTVNSQGALPGMVWQNRDVYLQGPIWAKIPHTDGNFHPSPLMGGFGLKHPPPQILIKNTPVPADPPTTFNQSKLNSFITQYSTGQVSVEIEWELQKENSKRWNPEIQYTSNLCKSTSVDFAVNTEGVYSEPHPIGTRYLTRPL

SEQ ID NO: 857 - protein, 737 aa, synthetic construct
MAADGYLPDWLEDTLSEGIRQWWKLKPGPPPPKPAERHKDDSRGLVLPGYKYLGPFNGLDKGEPVNEADAAALEHDKAYDRQLDSGDNPYLKYNHADAEFQERLKEDTSFGGNLGRAVFQAKKRLLEPLGLVEEAAKTAPGKKRPVEQSPQEPDSSSGIGKTGQQPAKKRLNFGQTGDTESVPDPQPIGEPPAAPSGVGSLTMASGGGAPVADNNEGADGVGSSSGNWHCDSQWLGDRVITTSTRTWALPTYNNHLYKQISNGTSGGATNDNTYFGYSTPWGYFDFNRFHCHFSPRDWQRLINNNWGFRPKRLSFKLFNIQVKEVTQNEGTKTIANNLTSTVQVFADSEYQLPYVLGSAHQGCLPPFPADVFMIPQYGYLTLNNGSQAVGRSSFYCLEYFPSQMLRTGNNFQFTYTFEDVPFHSSYAHSQSLDRLMNPLIDQYLYYLSRTQTTGGTANTQTLGFSQGGPNTMANQAKNWLPGPCYRQQRVSTTTGQNNNSNFAWTAGTKYHLNGRNSLANPGIAMATHKDDKERFFPSNGILIFGKQNAARDNADYSDVMLTSEEEIKTTNPVATEEYGIVADNLQQQNTAPQIGTVNSQGALPGMVWQNRDVYLQGPIWAKIPHTDGNFHPSPLMGGFGLKHPPPQILIKNTPVPADPPTTFNQSKLNSFITQYSTGQVSVEIEWELQKENSKRWNPEIQYTSNLYKSTSVDFAVNTEGVYSEPHPIGTRYLTRPL

SEQ ID NO: 858 - protein, 737 aa, synthetic construct
MAADGYLPDWLEDTLSEGIRQWWKLKPGPPPPKPAERHKDDSRGLVLPGYKYLGPFNGLDKGEPVNEADAAALEHDKAYDRQLDSGDNPYLKYNHADAEFQERLKEDTSFGGNLGRAVFQAKKRLLEPLGLVEEAAKTAPGKKRPVEQSPQEPDSSSGIGKTGQQPAKKRLNFGQTGDTESVPDPQPIGEPPAAPSGVGSLTMASGGGAPVADNNEGADGVGSSSGNWHCDSQWLGDRVITTSTRTWALPTYNNHLYKQISNGTSGGATNDNTYFGYSTPWGYFDFNRFHCHFSPRDWQRLINNNWGFRPKRLSFKLFNIQVKEVTQNEGTKTIANNLTSTVQVFADSEYQLPYVLGSAHQGCLPPFPADVFMIPQYGYLTLNNGSQAVGRSSFYCLEYFPSQMLRTGNNFQFTYTFEDVPFHSSYAHSQSLDRLMNPLIDQYLYYLSRTQTTGGTANTQTLGFSQGGPNTMANQAKNWLPGPCYRQQRVSTTTGQNNNSNIAWTAGTKYHLNGRNSLANPGIAMATHKDDKERFFPSNGILIFGKQNAARDNADYSDVMLTSEEEIKTTNPVATEEYGIVADNLQQQNTAPQIGTVNSQGALPGMVWQNRDVYLQGPIWAKIPHTDGNFHPSPLMGGFGLKHPPPQILIKNTPVPADPPTTFNQSKLNSFITQYSTGQVSVEIEWELQKENSKRWNPEIQYTSNLYKSTSVDFAVNTEGVYSEPHPIGTRYLTRPL

SEQ ID NO: 859 - protein, 737 aa, synthetic construct
MAADGYLPDWLEDTLSEGIRQWWKLKPGPPPPKPAERHKDDSRGLVLPGYKYLGPFNGLDKGEPVNEADAAALEHDKAYDRQLDSGDNPYLKYNHADAEFQERLKEDTSFGGNLGRAVFQAKKRLLEPLGLVEEAAKTAPGKKRPVEQSPQEPDSSSGIGKTGQQPAKKRLNFGQTGDTESVPDPQPIGEPPAAPSGVGSLTMASGGGAPVADNNEGADGVGSSSGNWHCDSQWLGDRVITTSTRTWALPTYNNHLYKQISNGTSGGATNDNTYFGYSTPWGYFDFNRFHCHFSPRDWQRLINNNWGFRPKRLSFKLFNIQVKEVTQNEGTKTIANNLTSTVQVFADSEYQLPYVLGSAHQGCLPPFPADVFMIPQYGYLTLNNGSQAVGRSSFYCLEYFPSQMLRTGNNFQFTYTFEDVPFHSSYAHSQSLDRLMNPLIDQYLYYLSRTQTTGGTANTQTLGFSQGGPNTMANQAKNWLPGPCYRQQRVSTTTGQNNNSNFAWTRGTKYHLNGRNSLANPGIAMATHKDDKERFFPSNGILIFGKQNAARDNADYSDVMLTSEEEIKTTNPVATEEYGIVADNLQQQNTAPQIGTVNSQGALPGMVWQNRDVYLQGPIWAKIPHTDGNFHPSPLMGGFGLKHPPPQILIKNTPVPADPPTTFNQSKLNSFITQYSTGQVSVEIEWELQKENSKRWNPEIQYTSNLYKSTSVDFAVNTEGVYSEPHPIGTRYLTRPL

SEQ ID NO: 860 - protein, 737 aa, synthetic construct
MAADGYLPDWLEDTLSEGIRQWWKLKPGPPPPKPAERHKDDSRGLVLPGYKYLGPFNGLDKGEPVNEADAAALEHDKAYDRQLDSGDNPYLKYNHADAEFQERLKEDTSFGGNLGRAVFQAKKRLLEPLGLVEEAAKTAPGKKRPVEQSPQEPDSSSGIGKTGQQPAKKRLNFGQTGDTESVPDPQPIGEPPAAPSGVGSLTMASGGGAPVADNNEGADGVGSSSGNWHCDSQWLGDRVITTSTRTWALPTYNNHLYKQISNGTSGGATNDNTYFGYSTPWGYFDFNRFHCHFSPRDWQRLINNNWGFRPKRLSFKLFNIQVKEVTQNEGTKTIANNLTSTVQVFADSEYQLPYVLGSAHQGCLPPFPADVFMIPQYGYLTLNNGSQAVGRSSFYCLEYFPSQMLRTGNNFQFTYTFEDVPFHSSYAHSQSLDRLMNPLIDQYLYYLSRTQTTGGTANTQTLGFSQGGPNTMANQAKNWLPGPCYRQQRVSTTTGQNNNSNFAWTAGTKYHLNGRNSLANPGIAMATHKDDKERFFPSNGILIFGKQNAARDNADYSDVMLTSEEEIKTTNPVATEEYGIVADNLQQQNTAPQIGTVNSQGALPGMVWQNRDVYLQGPIWAKIPHTDGNFHPSPLMGGFGLKHPPPQILIKNTPVPADPPTTFNQSKLNSFITQYSTGQVSVEIEWELQKENSKRWNPEIQYTSNLCKSTSVDFAVNTEGVYSEPHPIGTRYLTRPL

SEQ ID NO: 861 - protein, 737 aa, synthetic construct
MAADGYLPDWLEDTLSEGIRQWWKLKPGPPPPKPAERHKDDSRGLVLPGYKYLGPFNGLDKGEPVNEADAAALEHDKAYDRQLDSGDNPYLKYNHADAEFQERLKEDTSFGGNLGRAVFQAKKRLLEPLGLVEEAAKTAPGKKRPVEQSPQEPDSSSGIGKTGQQPAKKRLNFGQTGDTESVPDPQPIGEPPAAPSGVGSLTMASGGGAPVADNNEGADGVGSSSGNWHCDSQWLGDRVITTSTRTWALPTYNNHLYKQISNGTSGGATNDNTYFGYSTPWGYFDFNRFHCHFSPRDWQRLINNNWGFRPKRLSFKLFNIQVKEVTQNEGTKTIANNLTSTVQVFADSEYQLPYVLGSAHQGCLPPFPADVFMIPQYGYLTLNNGSQAVGRSSFYCLEYFPSQMLRTGNNFQFTYTFEDVPFHSSYAHSQSLDRLMNPLIDQYLYYLSRTQTTGGTANTQTLGFSQGGPNTMANQAKNWLPGPCYRQQRVSTTTGQNNNSNIAWTRGTKYHLNGRNSLANPGIAMATHKDDKERFFPSNGILIFGKQNAARDNADYSDVMLTSEEEIKTTNPVATEEYGIVADNLQQQNTAPQIGTVNSQGALPGMVWQNRDVYLQGPIWAKIPHTDGNFHPSPLMGGFGLKHPPPQILIKNTPVPADPPTTFNQSKLNSFITQYSTGQVSVEIEWELQKENSKRWNPEIQYTSNLYKSTSVDFAVNTEGVYSEPHPIGTRYLTRPL

SEQ ID NO: 862 - protein, 737 aa, synthetic construct
MAADGYLPDWLEDTLSEGIRQWWKLKPGPPPPKPAERHKDDSRGLVLPGYKYLGPFNGLDKGEPVNEADAAALEHDKAYDRQLDSGDNPYLKYNHADAEFQERLKEDTSFGGNLGRAVFQAKKRLLEPLGLVEEAAKTAPGKKRPVEQSPQEPDSSSGIGKTGQQPAKKRLNFGQTGDTESVPDPQPIGEPPAAPSGVGSLTMASGGGAPVADNNEGADGVGSSSGNWHCDSQWLGDRVITTSTRTWALPTYNNHLYKQISNGTSGGATNDNTYFGYSTPWGYFDFNRFHCHFSPRDWQRLINNNWGFRPKRLSFKLFNIQVKEVTQNEGTKTIANNLTSTVQVFADSEYQLPYVLGSAHQGCLPPFPADVFMIPQYGYLTLNNGSQAVGRSSFYCLEYFPSQMLRTGNNFQFTYTFEDVPFHSSYAHSQSLDRLMNPLIDQYLYYLSRTQTTGGTANTQTLGFSQGGPNTMANQAKNWLPGPCYRQQRVSTTTGQNNNSNIAWTAGTKYHLNGRNSLANPGIAMATHKDDKERFFPSNGILIFGKQNAARDNADYSDVMLTSEEEIKTTNPVATEEYGIVADNLQQQNTAPQIGTVNSQGALPGMVWQNRDVYLQGPIWAKIPHTDGNFHPSPLMGGFGLKHPPPQILIKNTPVPADPPTTFNQSKLNSFITQYSTGQVSVEIEWELQKENSKRWNPEIQYTSNLCKSTSVDFAVNTEGVYSEPHPIGTRYLTRPL

SEQ ID NO: 863 - protein, 737 aa, synthetic construct
MAADGYLPDWLEDTLSEGIRQWWKLKPGPPPPKPAERHKDDSRGLVLPGYKYLGPFNGLDKGEPVNEADAAALEHDKAYDRQLDSGDNPYLKYNHADAEFQERLKEDTSFGGNLGRAVFQAKKRLLEPLGLVEEAAKTAPGKKRPVEQSPQEPDSSSGIGKTGQQPAKKRLNFGQTGDTESVPDPQPIGEPPAAPSGVGSLTMASGGGAPVADNNEGADGVGSSSGNWHCDSQWLGDRVITTSTRTWALPTYNNHLYKQISNGTSGGATNDNTYFGYSTPWGYFDFNRFHCHFSPRDWQRLINNNWGFRPKRLSFKLFNIQVKEVTQNEGTKTIANNLTSTVQVFADSEYQLPYVLGSAHQGCLPPFPADVFMIPQYGYLTLNNGSQAVGRSSFYCLEYFPSQMLRTGNNFQFTYTFEDVPFHSSYAHSQSLDRLMNPLIDQYLYYLSRTQTTGGTANTQTLGFSQGGPNTMANQAKNWLPGPCYRQQRVSTTTGQNNNSNFAWTRGTKYHLNGRNSLANPGIAMATHKDDKERFFPSNGILIFGKQNAARDNADYSDVMLTSEEEIKTTNPVATEEYGIVADNLQQQNTAPQIGTVNSQGALPGMVWQNRDVYLQGPIWAKIPHTDGNFHPSPLMGGFGLKHPPPQILIKNTPVPADPPTTFNQSKLNSFITQYSTGQVSVEIEWELQKENSKRWNPEIQYTSNLCKSTSVDFAVNTEGVYSEPHPIGTRYLTRPL

SEQ ID NO: 864 - protein, 737 aa, synthetic construct
MAADGYLPDWLEDTLSEGIRQWWKLKPGPPPPKPAERHKDDSRGLVLPGYKYLGPFNGLDKGEPVNEADAAALEHDKAYDRQLDSGDNPYLKYNHADAEFQERLKEDTSFGGNLGRAVFQAKKRLLEPLGLVEEAAKTAPGKKRPVEQSPQEPDSSSGIGKTGQQPAKKRLNFGQTGDTESVPDPQPIGEPPAAPSGVGSLTMASGGGAPVADNNEGADGVGSSSGNWHCDSQWLGDRVITTSTRTWALPTYNNHLYKQISNGTSGGATNDNTYFGYSTPWGYFDFNRFHCHFSPRDWQRLINNNWGFRPKRLSFKLFNIQVKEVTQNEGTKTIANNLTSTVQVFADSEYQLPYVLGSAHQGCLPPFPADVFMIPQYGYLTLNNGSQAVGRSSFYCLEYFPSQMLRTGNNFQFTYTFEDVPFHSSYAHSQSLDRLMNPLIDQYLYYLSRTQTTGGTANTQTLGFSQGGPNTMANQAKNWLPGPCYRQQRVSTTTGQNNNSNIAWTRGTKYHLNGRNSLANPGIAMATHKDDKERFFPSNGILIFGKQNAARDNADYSDVMLTSEEEIKTTNPVATEEYGIVADNLQQQNTAPQIGTVNSQGALPGMVWQNRDVYLQGPIWAKIPHTDGNFHPSPLMGGFGLKHPPPQILIKNTPVPADPPTTFNQSKLNSFITQYSTGQVSVEIEWELQKENSKRWNPEIQYTSNLCKSTSVDFAVNTEGVYSEPHPIGTRYLTRPL

SEQ ID NO: 865 - protein, 738 aa, synthetic construct
MAADGYLPDWLEDNLSEGIREWWDLKPGAPKPKANQQKQDDGRGLVLPGYKYLGPFNGLDKGEPVNAADAAALEHDKAYDQQLKAGDNPYLRYNHADAEFQERLQEDTSFGGNLGRAVFQAKKRVLEPLGLVEEGAKTAPGKKRPVEPSPQRSPDSSTGIGKKGQQPAKKRLNFGQTGDSESVPDPQPIGEPPAGPSGLGSGTMAAGGGAPMADNNEGADGVGSSSGNWHCDSTWLGDRVITTSTRTWALPTYNNHLYKQISNGTSGGSTNDNTYFGYSTPWGYFDFNRFHCHFSPRDWQRLINNNWGFRPKRLNFKLFNIQVKEVTQNEGTKTIANNLTSTIQVFGDSEYQLPYVLGSAHQGCLPPFPADVFMIPQYGYLTLNNGSQAVGRSSFYCLEYFPSQMLRTGNNFEFSYQFEDVPFHSSYAHSQSLDRLMNPLIDQYLYYLSRTQSTGGTAGTQQLLFSQAGPNNMSAQAKNWLPGPCYRQQRVSTTLSQNNNSNFAWTGATKYHLNGRDSLVNPGVAMATHKDDEERFFPSSGVLMFGKQGAGKDNVDYSSVMLTSEEEIKTTNPVATEQYGVVADNLQQQNAAPIVGAVNSQGALPGMVWQNRDVYLQGPIWAKIPHTDGNFHPSPLMGGFGLKHPPPQILIKNTPVPADPPTTFSQAKLASFITQYSTGQVSVEIEWELQKENSKRWNPEIQYTSNYYKSTNVDFAVNTDGTYSEPRPIGTRYLTRNL

SEQ ID NO: 866 - protein, 738 aa, synthetic construct
MAADGYLPDWLEDNLSEGIREWWDLKPGAPKPKANQQKQDDGRGLVLPGYKYLGPFNGLDKGEPVNAADAAALEHDKAYDQQLKAGDNPYLRYNHADAEFQERLQEDTSFGGNLGRAVFQAKKRVLEPLGLVEEGAKTAPGKKRPVEPSPQRSPDSSTGIGKKGQQPAKKRLNFGQTGDSESVPDPQPIGEPPAGPSGLGSGTMAAGGGAPMADNNEGADGVGSSSGNWHCDSTWLGDRVITTSTRTWALPTYNNHLYKQISNGTSGGSTNDNTYFGYSTPWGYFDFNRFHCHFSPRDWQRLINNNWGFRPKRLNFKLFNIQVKEVTQNEGTKTIANNLTSTIQVFGDSEYQLPYVLGSAHQGCLPPFPADVFMIPQYGYLTLNNGSQAVGRSSFYCLEYFPSQMLRTGNNFEFSYQFEDVPFHSSYAHSQSLDRLMNPLIDQYLYYLSRTQSTGGTAGTQQLLFSQAGPNNMSAQAKNWLPGPCYRQQRVSTTLSQNNNSNIAWTGATKYHLNGRDSLVNPGVAMATHKDDEERFFPSSGVLMFGKQGAGKDNVDYSSVMLTSEEEIKTTNPVATEQYGVVADNLQQQNAAPIVGAVNSQGALPGMVWQNRDVYLQGPIWAKIPHTDGNFHPSPLMGGFGLKHPPPQILIKNTPVPADPPTTFSQAKLASFITQYSTGQVSVEIEWELQKENSKRWNPEIQYTSNYYKSTNVDFAVNTDGTYSEPRPIGTRYLTRNL

SEQ ID NO: 867 - protein, 738 aa, synthetic construct
MAADGYLPDWLEDNLSEGIREWWDLKPGAPKPKANQQKQDDGRGLVLPGYKYLGPFNGLDKGEPVNAADAAALEHDKAYDQQLKAGDNPYLRYNHADAEFQERLQEDTSFGGNLGRAVFQAKKRVLEPLGLVEEGAKTAPGKKRPVEPSPQRSPDSSTGIGKKGQQPAKKRLNFGQTGDSESVPDPQPIGEPPAGPSGLGSGTMAAGGGAPMADNNEGADGVGSSSGNWHCDSTWLGDRVITTSTRTWALPTYNNHLYKQISNGTSGGSTNDNTYFGYSTPWGYFDFNRFHCHFSPRDWQRLINNNWGFRPKRLNFKLFNIQVKEVTQNEGTKTIANNLTSTIQVFGDSEYQLPYVLGSAHQGCLPPFPADVFMIPQYGYLTLNNGSQAVGRSSFYCLEYFPSQMLRTGNNFEFSYQFEDVPFHSSYAHSQSLDRLMNPLIDQYLYYLSRTQSTGGTAGTQQLLFSQAGPNNMSAQAKNWLPGPCYRQQRVSTTLSQNNNSNFAWTRATKYHLNGRDSLVNPGVAMATHKDDEERFFPSSGVLMFGKQGAGKDNVDYSSVMLTSEEEIKTTNPVATEQYGVVADNLQQQNAAPIVGAVNSQGALPGMVWQNRDVYLQGPIWAKIPHTDGNFHPSPLMGGFGLKHPPPQILIKNTPVPADPPTTFSQAKLASFITQYSTGQVSVEIEWELQKENSKRWNPEIQYTSNYYKSTNVDFAVNTDGTYSEPRPIGTRYLTRNL

SEQ ID NO: 868 - protein, 738 aa, synthetic construct
MAADGYLPDWLEDNLSEGIREWWDLKPGAPKPKANQQKQDDGRGLVLPGYKYLGPFNGLDKGEPVNAADAAALEHDKAYDQQLKAGDNPYLRYNHADAEFQERLQEDTSFGGNLGRAVFQAKKRVLEPLGLVEEGAKTAPGKKRPVEPSPQRSPDSSTGIGKKGQQPAKKRLNFGQTGDSESVPDPQPIGEPPAGPSGLGSGTMAAGGGAPMADNNEGADGVGSSSGNWHCDSTWLGDRVITTSTRTWALPTYNNHLYKQISNGTSGGSTNDNTYFGYSTPWGYFDFNRFHCHFSPRDWQRLINNNWGFRPKRLNFKLFNIQVKEVTQNEGTKTIANNLTSTIQVFGDSEYQLPYVLGSAHQGCLPPFPADVFMIPQYGYLTLNNGSQAVGRSSFYCLEYFPSQMLRTGNNFEFSYQFEDVPFHSSYAHSQSLDRLMNPLIDQYLYYLSRTQSTGGTAGTQQLLFSQAGPNNMSAQAKNWLPGPCYRQQRVSTTLSQNNNSNFAWTGATKYHLNGRDSLVNPGVAMATHKDDEERFFPSSGVLMFGKQGAGKDNVDYSSVMLTSEEEIKTTNPVATEQYGVVADNLQQQNAAPIVGAVNSQGALPGMVWQNRDVYLQGPIWAKIPHTDGNFHPSPLMGGFGLKHPPPQILIKNTPVPADPPTTFSQAKLASFITQYSTGQVSVEIEWELQKENSKRWNPEIQYTSNYCKSTNVDFAVNTDGTYSEPRPIGTRYLTRNL

SEQ ID NO: 869 - protein, 738 aa, synthetic construct
MAADGYLPDWLEDNLSEGIREWWDLKPGAPKPKANQQKQDDGRGLVLPGYKYLGPFNGLDKGEPVNAADAAALEHDKAYDQQLKAGDNPYLRYNHADAEFQERLQEDTSFGGNLGRAVFQAKKRVLEPLGLVEEGAKTAPGKKRPVEPSPQRSPDSSTGIGKKGQQPAKKRLNFGQTGDSESVPDPQPIGEPPAGPSGLGSGTMAAGGGAPMADNNEGADGVGSSSGNWHCDSTWLGDRVITTSTRTWALPTYNNHLYKQISNGTSGGSTNDNTYFGYSTPWGYFDFNRFHCHFSPRDWQRLINNNWGFRPKRLNFKLFNIQVKEVTQNEGTKTIANNLTSTIQVFGDSEYQLPYVLGSAHQGCLPPFPADVFMIPQYGYLTLNNGSQAVGRSSFYCLEYFPSQMLRTGNNFEFSYQFEDVPFHSSYAHSQSLDRLMNPLIDQYLYYLSRTQSTGGTAGTQQLLFSQAGPNNMSAQAKNWLPGPCYRQQRVSTTLSQNNNSNIAWTRATKYHLNGRDSLVNPGVAMATHKDDEERFFPSSGVLMFGKQGAGKDNVDYSSVMLTSEEEIKTTNPVATEQYGVVADNLQQQNAAPIVGAVNSQGALPGMVWQNRDVYLQGPIWAKIPHTDGNFHPSPLMGGFGLKHPPPQILIKNTPVPADPPTTFSQAKLASFITQYSTGQVSVEIEWELQKENSKRWNPEIQYTSNYYKSTNVDFAVNTDGTYSEPRPIGTRYLTRNL

SEQ ID NO: 870 - protein, 738 aa, synthetic construct
MAADGYLPDWLEDNLSEGIREWWDLKPGAPKPKANQQKQDDGRGLVLPGYKYLGPFNGLDKGEPVNAADAAALEHDKAYDQQLKAGDNPYLRYNHADAEFQERLQEDTSFGGNLGRAVFQAKKRVLEPLGLVEEGAKTAPGKKRPVEPSPQRSPDSSTGIGKKGQQPAKKRLNFGQTGDSESVPDPQPIGEPPAGPSGLGSGTMAAGGGAPMADNNEGADGVGSSSGNWHCDSTWLGDRVITTSTRTWALPTYNNHLYKQISNGTSGGSTNDNTYFGYSTPWGYFDFNRFHCHFSPRDWQRLINNNWGFRPKRLNFKLFNIQVKEVTQNEGTKTIANNLTSTIQVFGDSEYQLPYVLGSAHQGCLPPFPADVFMIPQYGYLTLNNGSQAVGRSSFYCLEYFPSQMLRTGNNFEFSYQFEDVPFHSSYAHSQSLDRLMNPLIDQYLYYLSRTQSTGGTAGTQQLLFSQAGPNNMSAQAKNWLPGPCYRQQRVSTTLSQNNNSNIAWTGATKYHLNGRDSLVNPGVAMATHKDDEERFFPSSGVLMFGKQGAGKDNVDYSSVMLTSEEEIKTTNPVATEQYGVVADNLQQQNAAPIVGAVNSQGALPGMVWQNRDVYLQGPIWAKIPHTDGNFHPSPLMGGFGLKHPPPQILIKNTPVPADPPTTFSQAKLASFITQYSTGQVSVEIEWELQKENSKRWNPEIQYTSNYCKSTNVDFAVNTDGTYSEPRPIGTRYLTRNL

SEQ ID NO: 871 - protein, 738 aa, synthetic construct
MAADGYLPDWLEDNLSEGIREWWDLKPGAPKPKANQQKQDDGRGLVLPGYKYLGPFNGLDKGEPVNAADAAALEHDKAYDQQLKAGDNPYLRYNHADAEFQERLQEDTSFGGNLGRAVFQAKKRVLEPLGLVEEGAKTAPGKKRPVEPSPQRSPDSSTGIGKKGQQPAKKRLNFGQTGDSESVPDPQPIGEPPAGPSGLGSGTMAAGGGAPMADNNEGADGVGSSSGNWHCDSTWLGDRVITTSTRTWALPTYNNHLYKQISNGTSGGSTNDNTYFGYSTPWGYFDFNRFHCHFSPRDWQRLINNNWGFRPKRLNFKLFNIQVKEVTQNEGTKTIANNLTSTIQVFGDSEYQLPYVLGSAHQGCLPPFPADVFMIPQYGYLTLNNGSQAVGRSSFYCLEYFPSQMLRTGNNFEFSYQFEDVPFHSSYAHSQSLDRLMNPLIDQYLYYLSRTQSTGGTAGTQQLLFSQAGPNNMSAQAKNWLPGPCYRQQRVSTTLSQNNNSNFAWTRATKYHLNGRDSLVNPGVAMATHKDDEERFFPSSGVLMFGKQGAGKDNVDYSSVMLTSEEEIKTTNPVATEQYGVVADNLQQQNAAPIVGAVNSQGALPGMVWQNRDVYLQGPIWAKIPHTDGNFHPSPLMGGFGLKHPPPQILIKNTPVPADPPTTFSQAKLASFITQYSTGQVSVEIEWELQKENSKRWNPEIQYTSNYCKSTNVDFAVNTDGTYSEPRPIGTRYLTRNL

SEQ ID NO: 872 - protein, 738 aa, synthetic construct
MAADGYLPDWLEDNLSEGIREWWDLKPGAPKPKANQQKQDDGRGLVLPGYKYLGPFNGLDKGEPVNAADAAALEHDKAYDQQLKAGDNPYLRYNHADAEFQERLQEDTSFGGNLGRAVFQAKKRVLEPLGLVEEGAKTAPGKKRPVEPSPQRSPDSSTGIGKKGQQPAKKRLNFGQTGDSESVPDPQPIGEPPAGPSGLGSGTMAAGGGAPMADNNEGADGVGSSSGNWHCDSTWLGDRVITTSTRTWALPTYNNHLYKQISNGTSGGSTNDNTYFGYSTPWGYFDFNRFHCHFSPRDWQRLINNNWGFRPKRLNFKLFNIQVKEVTQNEGTKTIANNLTSTIQVFGDSEYQLPYVLGSAHQGCLPPFPADVFMIPQYGYLTLNNGSQAVGRSSFYCLEYFPSQMLRTGNNFEFSYQFEDVPFHSSYAHSQSLDRLMNPLIDQYLYYLSRTQSTGGTAGTQQLLFSQAGPNNMSAQAKNWLPGPCYRQQRVSTTLSQNNNSNIAWTRATKYHLNGRDSLVNPGVAMATHKDDEERFFPSSGVLMFGKQGAGKDNVDYSSVMLTSEEEIKTTNPVATEQYGVVADNLQQQNAAPIVGAVNSQGALPGMVWQNRDVYLQGPIWAKIPHTDGNFHPSPLMGGFGLKHPPPQILIKNTPVPADPPTTFSQAKLASFITQYSTGQVSVEIEWELQKENSKRWNPEIQYTSNYCKSTNVDFAVNTDGTYSEPRPIGTRYLTRNL

SEQ ID NO: 873 - protein, 738 aa, synthetic construct
MAADGYLPDWLEDNLSEGIREWWDLKPGAPKPKANQQKQDDGRGLVLPGYKYLGPFNGLDKGEPVNAADAAALEHDKAYDQQLKAGDNPYLRYNHADAEFQERLQEDTSFGGNLGRAVFQAKKRVLEPLGLVEEGAKTAPGKKRPVEPSPQRSPDSSTGIGKKGQQPAKKRLNFGQTGDSESVPDPQPIGEPPAGPSGLGSGTMAAGGGAPMADNNEGADGVGSSSGNWHCDSTWLGDRVITTSTRTWALPTYNNHLYKQISNGTSGGSTNDNTYFGYSTPWGYFDFNRFHCHFSPRDWQRLINNNWGFRPKRLNFKLFNIQVKEVTQNEGTKTIANNLTSTIQVFTDSEYQLPYVLGSAHQGCLPPFPADVFMIPQYGYLTLNNGSQAVGRSSFYCLEYFPSQMLRTGNNFEFSYQFEDVPFHSSYAHSQSLDRLMNPLIDQYLYYLSRTQSTGGTAGTQQLLFSQAGPNNMSAQAKNWLPGPCYRQQRVSTTLSQNNNSNFAWTGATKYHLNGRDSLVNPGVAMATHKDDEERFFPSSGVLMFGKQGAGKDNVDYSSVMLTSEEEIKTTNPVATEQYGVVADNLQQQNAAPIVGAVNSQGALPGMVWQNRDVYLQGPIWAKIPHTDGNFHPSPLMGGFGLKHPPPQILIKNTPVPADPPTTFSQAKLASFITQYSTGQVSVEIEWELQKENSKRWNPEIQYTSNLYKSTNVDFAVNTDGTYSEPRPIGTRYLTRNL

SEQ ID NO: 874 - protein, 738 aa, synthetic construct
MAADGYLPDWLEDNLSEGIREWWDLKPGAPKPKANQQKQDDGRGLVLPGYKYLGPFNGLDKGEPVNAADAAALEHDKAYDQQLKAGDNPYLRYNHADAEFQERLQEDTSFGGNLGRAVFQAKKRVLEPLGLVEEGAKTAPGKKRPVEPSPQRSPDSSTGIGKKGQQPAKKRLNFGQTGDSESVPDPQPIGEPPAGPSGLGSGTMAAGGGAPMADNNEGADGVGSSSGNWHCDSTWLGDRVITTSTRTWALPTYNNHLYKQISNGTSGGSTNDNTYFGYSTPWGYFDFNRFHCHFSPRDWQRLINNNWGFRPKRLNFKLFNIQVKEVTQNEGTKTIANNLTSTIQVFTDSEYQLPYVLGSAHQGCLPPFPADVFMIPQYGYLTLNNGSQAVGRSSFYCLEYFPSQMLRTGNNFEFSYQFEDVPFHSSYAHSQSLDRLMNPLIDQYLYYLSRTQSTGGTAGTQQLLFSQAGPNNMSAQAKNWLPGPCYRQQRVSTTLSQNNNSNIAWTGATKYHLNGRDSLVNPGVAMATHKDDEERFFPSSGVLMFGKQGAGKDNVDYSSVMLTSEEEIKTTNPVATEQYGVVADNLQQQNAAPIVGAVNSQGALPGMVWQNRDVYLQGPIWAKIPHTDGNFHPSPLMGGFGLKHPPPQILIKNTPVPADPPTTFSQAKLASFITQYSTGQVSVEIEWELQKENSKRWNPEIQYTSNLYKSTNVDFAVNTDGTYSEPRPIGTRYLTRNL

SEQ ID NO: 875 - protein, 738 aa, synthetic construct
MAADGYLPDWLEDNLSEGIREWWDLKPGAPKPKANQQKQDDGRGLVLPGYKYLGPFNGLDKGEPVNAADAAALEHDKAYDQQLKAGDNPYLRYNHADAEFQERLQEDTSFGGNLGRAVFQAKKRVLEPLGLVEEGAKTAPGKKRPVEPSPQRSPDSSTGIGKKGQQPAKKRLNFGQTGDSESVPDPQPIGEPPAGPSGLGSGTMAAGGGAPMADNNEGADGVGSSSGNWHCDSTWLGDRVITTSTRTWALPTYNNHLYKQISNGTSGGSTNDNTYFGYSTPWGYFDFNRFHCHFSPRDWQRLINNNWGFRPKRLNFKLFNIQVKEVTQNEGTKTIANNLTSTIQVFTDSEYQLPYVLGSAHQGCLPPFPADVFMIPQYGYLTLNNGSQAVGRSSFYCLEYFPSQMLRTGNNFEFSYQFEDVPFHSSYAHSQSLDRLMNPLIDQYLYYLSRTQSTGGTAGTQQLLFSQAGPNNMSAQAKNWLPGPCYRQQRVSTTLSQNNNSNFAWTRATKYHLNGRDSLVNPGVAMATHKDDEERFFPSSGVLMFGKQGAGKDNVDYSSVMLTSEEEIKTTNPVATEQYGVVADNLQQQNAAPIVGAVNSQGALPGMVWQNRDVYLQGPIWAKIPHTDGNFHPSPLMGGFGLKHPPPQILIKNTPVPADPPTTFSQAKLASFITQYSTGQVSVEIEWELQKENSKRWNPEIQYTSNLYKSTNVDFAVNTDGTYSEPRPIGTRYLTRNL

SEQ ID NO: 876 - protein, 738 aa, synthetic construct
MAADGYLPDWLEDNLSEGIREWWDLKPGAPKPKANQQKQDDGRGLVLPGYKYLGPFNGLDKGEPVNAADAAALEHDKAYDQQLKAGDNPYLRYNHADAEFQERLQEDTSFGGNLGRAVFQAKKRVLEPLGLVEEGAKTAPGKKRPVEPSPQRSPDSSTGIGKKGQQPAKKRLNFGQTGDSESVPDPQPIGEPPAGPSGLGSGTMAAGGGAPMADNNEGADGVGSSSGNWHCDSTWLGDRVITTSTRTWALPTYNNHLYKQISNGTSGGSTNDNTYFGYSTPWGYFDFNRFHCHFSPRDWQRLINNNWGFRPKRLNFKLFNIQVKEVTQNEGTKTIANNLTSTIQVFTDSEYQLPYVLGSAHQGCLPPFPADVFMIPQYGYLTLNNGSQAVGRSSFYCLEYFPSQMLRTGNNFEFSYQFEDVPFHSSYAHSQSLDRLMNPLIDQYLYYLSRTQSTGGTAGTQQLLFSQAGPNNMSAQAKNWLPGPCYRQQRVSTTLSQNNNSNFAWTGATKYHLNGRDSLVNPGVAMATHKDDEERFFPSSGVLMFGKQGAGKDNVDYSSVMLTSEEEIKTTNPVATEQYGVVADNLQQQNAAPIVGAVNSQGALPGMVWQNRDVYLQGPIWAKIPHTDGNFHPSPLMGGFGLKHPPPQILIKNTPVPADPPTTFSQAKLASFITQYSTGQVSVEIEWELQKENSKRWNPEIQYTSNLCKSTNVDFAVNTDGTYSEPRPIGTRYLTRNL

SEQ ID NO: 877 - protein, 738 aa, synthetic construct
MAADGYLPDWLEDNLSEGIREWWDLKPGAPKPKANQQKQDDGRGLVLPGYKYLGPFNGLDKGEPVNAADAAALEHDKAYDQQLKAGDNPYLRYNHADAEFQERLQEDTSFGGNLGRAVFQAKKRVLEPLGLVEEGAKTAPGKKRPVEPSPQRSPDSSTGIGKKGQQPAKKRLNFGQTGDSESVPDPQPIGEPPAGPSGLGSGTMAAGGGAPMADNNEGADGVGSSSGNWHCDSTWLGDRVITTSTRTWALPTYNNHLYKQISNGTSGGSTNDNTYFGYSTPWGYFDFNRFHCHFSPRDWQRLINNNWGFRPKRLNFKLFNIQVKEVTQNEGTKTIANNLTSTIQVFTDSEYQLPYVLGSAHQGCLPPFPADVFMIPQYGYLTLNNGSQAVGRSSFYCLEYFPSQMLRTGNNFEFSYQFEDVPFHSSYAHSQSLDRLMNPLIDQYLYYLSRTQSTGGTAGTQQLLFSQAGPNNMSAQAKNWLPGPCYRQQRVSTTLSQNNNSNIAWTRATKYHLNGRDSLVNPGVAMATHKDDEERFFPSSGVLMFGKQGAGKDNVDYSSVMLTSEEEIKTTNPVATEQYGVVADNLQQQNAAPIVGAVNSQGALPGMVWQNRDVYLQGPIWAKIPHTDGNFHPSPLMGGFGLKHPPPQILIKNTPVPADPPTTFSQAKLASFITQYSTGQVSVEIEWELQKENSKRWNPEIQYTSNLYKSTNVDFAVNTDGTYSEPRPIGTRYLTRNL

SEQ ID NO: 878 - protein, 738 aa, synthetic construct
MAADGYLPDWLEDNLSEGIREWWDLKPGAPKPKANQQKQDDGRGLVLPGYKYLGPFNGLDKGEPVNAADAAALEHDKAYDQQLKAGDNPYLRYNHADAEFQERLQEDTSFGGNLGRAVFQAKKRVLEPLGLVEEGAKTAPGKKRPVEPSPQRSPDSSTGIGKKGQQPAKKRLNFGQTGDSESVPDPQPIGEPPAGPSGLGSGTMAAGGGAPMADNNEGADGVGSSSGNWHCDSTWLGDRVITTSTRTWALPTYNNHLYKQISNGTSGGSTNDNTYFGYSTPWGYFDFNRFHCHFSPRDWQRLINNNWGFRPKRLNFKLFNIQVKEVTQNEGTKTIANNLTSTIQVFTDSEYQLPYVLGSAHQGCLPPFPADVFMIPQYGYLTLNNGSQAVGRSSFYCLEYFPSQMLRTGNNFEFSYQFEDVPFHSSYAHSQSLDRLMNPLIDQYLYYLSRTQSTGGTAGTQQLLFSQAGPNNMSAQAKNWLPGPCYRQQRVSTTLSQNNNSNIAWTGATKYHLNGRDSLVNPGVAMATHKDDEERFFPSSGVLMFGKQGAGKDNVDYSSVMLTSEEEIKTTNPVATEQYGVVADNLQQQNAAPIVGAVNSQGALPGMVWQNRDVYLQGPIWAKIPHTDGNFHPSPLMGGFGLKHPPPQILIKNTPVPADPPTTFSQAKLASFITQYSTGQVSVEIEWELQKENSKRWNPEIQYTSNLCKSTNVDFAVNTDGTYSEPRPIGTRYLTRNL

SEQ ID NO: 879 - protein, 738 aa, synthetic construct
MAADGYLPDWLEDNLSEGIREWWDLKPGAPKPKANQQKQDDGRGLVLPGYKYLGPFNGLDKGEPVNAADAAALEHDKAYDQQLKAGDNPYLRYNHADAEFQERLQEDTSFGGNLGRAVFQAKKRVLEPLGLVEEGAKTAPGKKRPVEPSPQRSPDSSTGIGKKGQQPAKKRLNFGQTGDSESVPDPQPIGEPPAGPSGLGSGTMAAGGGAPMADNNEGADGVGSSSGNWHCDSTWLGDRVITTSTRTWALPTYNNHLYKQISNGTSGGSTNDNTYFGYSTPWGYFDFNRFHCHFSPRDWQRLINNNWGFRPKRLNFKLFNIQVKEVTQNEGTKTIANNLTSTIQVFTDSEYQLPYVLGSAHQGCLPPFPADVFMIPQYGYLTLNNGSQAVGRSSFYCLEYFPSQMLRTGNNFEFSYQFEDVPFHSSYAHSQSLDRLMNPLIDQYLYYLSRTQSTGGTAGTQQLLFSQAGPNNMSAQAKNWLPGPCYRQQRVSTTLSQNNNSNFAWTRATKYHLNGRDSLVNPGVAMATHKDDEERFFPSSGVLMFGKQGAGKDNVDYSSVMLTSEEEIKTTNPVATEQYGVVADNLQQQNAAPIVGAVNSQGALPGMVWQNRDVYLQGPIWAKIPHTDGNFHPSPLMGGFGLKHPPPQILIKNTPVPADPPTTFSQAKLASFITQYSTGQVSVEIEWELQKENSKRWNPEIQYTSNLCKSTNVDFAVNTDGTYSEPRPIGTRYLTRNL

SEQ ID NO: 880 - protein, 738 aa, synthetic construct
MAADGYLPDWLEDNLSEGIREWWDLKPGAPKPKANQQKQDDGRGLVLPGYKYLGPFNGLDKGEPVNAADAAALEHDKAYDQQLKAGDNPYLRYNHADAEFQERLQEDTSFGGNLGRAVFQAKKRVLEPLGLVEEGAKTAPGKKRPVEPSPQRSPDSSTGIGKKGQQPAKKRLNFGQTGDSESVPDPQPIGEPPAGPSGLGSGTMAAGGGAPMADNNEGADGVGSSSGNWHCDSTWLGDRVITTSTRTWALPTYNNHLYKQISNGTSGGSTNDNTYFGYSTPWGYFDFNRFHCHFSPRDWQRLINNNWGFRPKRLNFKLFNIQVKEVTQNEGTKTIANNLTSTIQVFTDSEYQLPYVLGSAHQGCLPPFPADVFMIPQYGYLTLNNGSQAVGRSSFYCLEYFPSQMLRTGNNFEFSYQFEDVPFHSSYAHSQSLDRLMNPLIDQYLYYLSRTQSTGGTAGTQQLLFSQAGPNNMSAQAKNWLPGPCYRQQRVSTTLSQNNNSNIAWTRATKYHLNGRDSLVNPGVAMATHKDDEERFFPSSGVLMFGKQGAGKDNVDYSSVMLTSEEEIKTTNPVATEQYGVVADNLQQQNAAPIVGAVNSQGALPGMVWQNRDVYLQGPIWAKIPHTDGNFHPSPLMGGFGLKHPPPQILIKNTPVPADPPTTFSQAKLASFITQYSTGQVSVEIEWELQKENSKRWNPEIQYTSNLCKSTNVDFAVNTDGTYSEPRPIGTRYLTRNL

SEQ ID NO: 881 - protein, 738 aa, synthetic construct
MAADGYLPDWLEDNLSEGIREWWDLKPGAPKPKANQQKQDDGRGLVLPGYKYLGPFNGLDKGEPVNAADAAALEHDKAYDQQLKAGDNPYLRYNHADAEFQERLQEDTSFGGNLGRAVFQAKKRVLEPLGLVEEGAKTAPGKKRPVEPSPQRSPDSSTGIGKKGQQPAKKRLNFGQTGDSESVPDPQPIGEPPAGPSGLGSGTMAAGGGAPMADNNEGADGVGSSSGNWHCDSTWLGDRVITTSTRTWALPTYNNHLYKQISNGTSGGSTNDNTYFGYSTPWGYFDFNRFHCHFSPRDWQRLINNNWGFRPKRLNFKLFNIQVKEVTQNEGTKTIANNLTSTIQVFGDSEYQLPYVLGSAHQGCLPPFPADVFMIPQYGYLTLNNGSQAVGRSSFYCLEYFPSQMLRTGNNFEFSYQFEDVPFHSSYAHSQSLDRLMNPLIDQYLYYLSRTQSTGGTAGTQQLLFSQAGPNNMSAQAKNWLPGPCYRQQRVSTTLSQNNNSNFAWTGATKYHLNGRDSLVNPGVAMATHKDDEERFFPSSGVLMFGKQGAGKDNVDYSSVMLTSEEEIKTTNPVATEQYGVVADNLQQQNAAPIVGAVNSQGALPGMVWQNRDVYLQGPIWAKIPHTDGNFHPSPLMGGFGLKHPPPQILIKNTPVPADPPTTFSQAKLASFITQYSTGQVSVEIEWELQKENSKRWNPEIQYTSNLYKSTNVDFAVNTDGTYSEPRPIGTRYLTRNL

SEQ ID NO: 882 - protein, 738 aa, synthetic construct
MAADGYLPDWLEDNLSEGIREWWDLKPGAPKPKANQQKQDDGRGLVLPGYKYLGPFNGLDKGEPVNAADAAALEHDKAYDQQLKAGDNPYLRYNHADAEFQERLQEDTSFGGNLGRAVFQAKKRVLEPLGLVEEGAKTAPGKKRPVEPSPQRSPDSSTGIGKKGQQPAKKRLNFGQTGDSESVPDPQPIGEPPAGPSGLGSGTMAAGGGAPMADNNEGADGVGSSSGNWHCDSTWLGDRVITTSTRTWALPTYNNHLYKQISNGTSGGSTNDNTYFGYSTPWGYFDFNRFHCHFSPRDWQRLINNNWGFRPKRLNFKLFNIQVKEVTQNEGTKTIANNLTSTIQVFGDSEYQLPYVLGSAHQGCLPPFPADVFMIPQYGYLTLNNGSQAVGRSSFYCLEYFPSQMLRTGNNFEFSYQFEDVPFHSSYAHSQSLDRLMNPLIDQYLYYLSRTQSTGGTAGTQQLLFSQAGPNNMSAQAKNWLPGPCYRQQRVSTTLSQNNNSNIAWTGATKYHLNGRDSLVNPGVAMATHKDDEERFFPSSGVLMFGKQGAGKDNVDYSSVMLTSEEEIKTTNPVATEQYGVVADNLQQQNAAPIVGAVNSQGALPGMVWQNRDVYLQGPIWAKIPHTDGNFHPSPLMGGFGLKHPPPQILIKNTPVPADPPTTFSQAKLASFITQYSTGQVSVEIEWELQKENSKRWNPEIQYTSNLYKSTNVDFAVNTDGTYSEPRPIGTRYLTRNL

SEQ ID NO: 883 - protein, 738 aa, synthetic construct
MAADGYLPDWLEDNLSEGIREWWDLKPGAPKPKANQQKQDDGRGLVLPGYKYLGPFNGLDKGEPVNAADAAALEHDKAYDQQLKAGDNPYLRYNHADAEFQERLQEDTSFGGNLGRAVFQAKKRVLEPLGLVEEGAKTAPGKKRPVEPSPQRSPDSSTGIGKKGQQPAKKRLNFGQTGDSESVPDPQPIGEPPAGPSGLGSGTMAAGGGAPMADNNEGADGVGSSSGNWHCDSTWLGDRVITTSTRTWALPTYNNHLYKQISNGTSGGSTNDNTYFGYSTPWGYFDFNRFHCHFSPRDWQRLINNNWGFRPKRLNFKLFNIQVKEVTQNEGTKTIANNLTSTIQVFGDSEYQLPYVLGSAHQGCLPPFPADVFMIPQYGYLTLNNGSQAVGRSSFYCLEYFPSQMLRTGNNFEFSYQFEDVPFHSSYAHSQSLDRLMNPLIDQYLYYLSRTQSTGGTAGTQQLLFSQAGPNNMSAQAKNWLPGPCYRQQRVSTTLSQNNNSNFAWTRATKYHLNGRDSLVNPGVAMATHKDDEERFFPSSGVLMFGKQGAGKDNVDYSSVMLTSEEEIKTTNPVATEQYGVVADNLQQQNAAPIVGAVNSQGALPGMVWQNRDVYLQGPIWAKIPHTDGNFHPSPLMGGFGLKHPPPQILIKNTPVPADPPTTFSQAKLASFITQYSTGQVSVEIEWELQKENSKRWNPEIQYTSNLYKSTNVDFAVNTDGTYSEPRPIGTRYLTRNL

SEQ ID NO: 884 - protein, 738 aa, synthetic construct
MAADGYLPDWLEDNLSEGIREWWDLKPGAPKPKANQQKQDDGRGLVLPGYKYLGPFNGLDKGEPVNAADAAALEHDKAYDQQLKAGDNPYLRYNHADAEFQERLQEDTSFGGNLGRAVFQAKKRVLEPLGLVEEGAKTAPGKKRPVEPSPQRSPDSSTGIGKKGQQPAKKRLNFGQTGDSESVPDPQPIGEPPAGPSGLGSGTMAAGGGAPMADNNEGADGVGSSSGNWHCDSTWLGDRVITTSTRTWALPTYNNHLYKQISNGTSGGSTNDNTYFGYSTPWGYFDFNRFHCHFSPRDWQRLINNNWGFRPKRLNFKLFNIQVKEVTQNEGTKTIANNLTSTIQVFGDSEYQLPYVLGSAHQGCLPPFPADVFMIPQYGYLTLNNGSQAVGRSSFYCLEYFPSQMLRTGNNFEFSYQFEDVPFHSSYAHSQSLDRLMNPLIDQYLYYLSRTQSTGGTAGTQQLLFSQAGPNNMSAQAKNWLPGPCYRQQRVSTTLSQNNNSNFAWTGATKYHLNGRDSLVNPGVAMATHKDDEERFFPSSGVLMFGKQGAGKDNVDYSSVMLTSEEEIKTTNPVATEQYGVVADNLQQQNAAPIVGAVNSQGALPGMVWQNRDVYLQGPIWAKIPHTDGNFHPSPLMGGFGLKHPPPQILIKNTPVPADPPTTFSQAKLASFITQYSTGQVSVEIEWELQKENSKRWNPEIQYTSNLCKSTNVDFAVNTDGTYSEPRPIGTRYLTRNL

SEQ ID NO: 885 - protein, 738 aa, synthetic construct
MAADGYLPDWLEDNLSEGIREWWDLKPGAPKPKANQQKQDDGRGLVLPGYKYLGPFNGLDKGEPVNAADAAALEHDKAYDQQLKAGDNPYLRYNHADAEFQERLQEDTSFGGNLGRAVFQAKKRVLEPLGLVEEGAKTAPGKKRPVEPSPQRSPDSSTGIGKKGQQPAKKRLNFGQTGDSESVPDPQPIGEPPAGPSGLGSGTMAAGGGAPMADNNEGADGVGSSSGNWHCDSTWLGDRVITTSTRTWALPTYNNHLYKQISNGTSGGSTNDNTYFGYSTPWGYFDFNRFHCHFSPRDWQRLINNNWGFRPKRLNFKLFNIQVKEVTQNEGTKTIANNLTSTIQVFGDSEYQLPYVLGSAHQGCLPPFPADVFMIPQYGYLTLNNGSQAVGRSSFYCLEYFPSQMLRTGNNFEFSYQFEDVPFHSSYAHSQSLDRLMNPLIDQYLYYLSRTQSTGGTAGTQQLLFSQAGPNNMSAQAKNWLPGPCYRQQRVSTTLSQNNNSNIAWTRATKYHLNGRDSLVNPGVAMATHKDDEERFFPSSGVLMFGKQGAGKDNVDYSSVMLTSEEEIKTTNPVATEQYGVVADNLQQQNAAPIVGAVNSQGALPGMVWQNRDVYLQGPIWAKIPHTDGNFHPSPLMGGFGLKHPPPQILIKNTPVPADPPTTFSQAKLASFITQYSTGQVSVEIEWELQKENSKRWNPEIQYTSNLYKSTNVDFAVNTDGTYSEPRPIGTRYLTRNL

SEQ ID NO: 886 - protein, 738 aa, synthetic construct
MAADGYLPDWLEDNLSEGIREWWDLKPGAPKPKANQQKQDDGRGLVLPGYKYLGPFNGLDKGEPVNAADAAALEHDKAYDQQLKAGDNPYLRYNHADAEFQERLQEDTSFGGNLGRAVFQAKKRVLEPLGLVEEGAKTAPGKKRPVEPSPQRSPDSSTGIGKKGQQPAKKRLNFGQTGDSESVPDPQPIGEPPAGPSGLGSGTMAAGGGAPMADNNEGADGVGSSSGNWHCDSTWLGDRVITTSTRTWALPTYNNHLYKQISNGTSGGSTNDNTYFGYSTPWGYFDFNRFHCHFSPRDWQRLINNNWGFRPKRLNFKLFNIQVKEVTQNEGTKTIANNLTSTIQVFGDSEYQLPYVLGSAHQGCLPPFPADVFMIPQYGYLTLNNGSQAVGRSSFYCLEYFPSQMLRTGNNFEFSYQFEDVPFHSSYAHSQSLDRLMNPLIDQYLYYLSRTQSTGGTAGTQQLLFSQAGPNNMSAQAKNWLPGPCYRQQRVSTTLSQNNNSNIAWTGATKYHLNGRDSLVNPGVAMATHKDDEERFFPSSGVLMFGKQGAGKDNVDYSSVMLTSEEEIKTTNPVATEQYGVVADNLQQQNAAPIVGAVNSQGALPGMVWQNRDVYLQGPIWAKIPHTDGNFHPSPLMGGFGLKHPPPQILIKNTPVPADPPTTFSQAKLASFITQYSTGQVSVEIEWELQKENSKRWNPEIQYTSNLCKSTNVDFAVNTDGTYSEPRPIGTRYLTRNL

SEQ ID NO: 887 - protein, 738 aa, synthetic construct
MAADGYLPDWLEDNLSEGIREWWDLKPGAPKPKANQQKQDDGRGLVLPGYKYLGPFNGLDKGEPVNAADAAALEHDKAYDQQLKAGDNPYLRYNHADAEFQERLQEDTSFGGNLGRAVFQAKKRVLEPLGLVEEGAKTAPGKKRPVEPSPQRSPDSSTGIGKKGQQPAKKRLNFGQTGDSESVPDPQPIGEPPAGPSGLGSGTMAAGGGAPMADNNEGADGVGSSSGNWHCDSTWLGDRVITTSTRTWALPTYNNHLYKQISNGTSGGSTNDNTYFGYSTPWGYFDFNRFHCHFSPRDWQRLINNNWGFRPKRLNFKLFNIQVKEVTQNEGTKTIANNLTSTIQVFGDSEYQLPYVLGSAHQGCLPPFPADVFMIPQYGYLTLNNGSQAVGRSSFYCLEYFPSQMLRTGNNFEFSYQFEDVPFHSSYAHSQSLDRLMNPLIDQYLYYLSRTQSTGGTAGTQQLLFSQAGPNNMSAQAKNWLPGPCYRQQRVSTTLSQNNNSNFAWTRATKYHLNGRDSLVNPGVAMATHKDDEERFFPSSGVLMFGKQGAGKDNVDYSSVMLTSEEEIKTTNPVATEQYGVVADNLQQQNAAPIVGAVNSQGALPGMVWQNRDVYLQGPIWAKIPHTDGNFHPSPLMGGFGLKHPPPQILIKNTPVPADPPTTFSQAKLASFITQYSTGQVSVEIEWELQKENSKRWNPEIQYTSNLCKSTNVDFAVNTDGTYSEPRPIGTRYLTRNL

SEQ ID NO: 888 - protein, 738 aa, synthetic construct
MAADGYLPDWLEDNLSEGIREWWDLKPGAPKPKANQQKQDDGRGLVLPGYKYLGPFNGLDKGEPVNAADAAALEHDKAYDQQLKAGDNPYLRYNHADAEFQERLQEDTSFGGNLGRAVFQAKKRVLEPLGLVEEGAKTAPGKKRPVEPSPQRSPDSSTGIGKKGQQPAKKRLNFGQTGDSESVPDPQPIGEPPAGPSGLGSGTMAAGGGAPMADNNEGADGVGSSSGNWHCDSTWLGDRVITTSTRTWALPTYNNHLYKQISNGTSGGSTNDNTYFGYSTPWGYFDFNRFHCHFSPRDWQRLINNNWGFRPKRLNFKLFNIQVKEVTQNEGTKTIANNLTSTIQVFGDSEYQLPYVLGSAHQGCLPPFPADVFMIPQYGYLTLNNGSQAVGRSSFYCLEYFPSQMLRTGNNFEFSYQFEDVPFHSSYAHSQSLDRLMNPLIDQYLYYLSRTQSTGGTAGTQQLLFSQAGPNNMSAQAKNWLPGPCYRQQRVSTTLSQNNNSNIAWTRATKYHLNGRDSLVNPGVAMATHKDDEERFFPSSGVLMFGKQGAGKDNVDYSSVMLTSEEEIKTTNPVATEQYGVVADNLQQQNAAPIVGAVNSQGALPGMVWQNRDVYLQGPIWAKIPHTDGNFHPSPLMGGFGLKHPPPQILIKNTPVPADPPTTFSQAKLASFITQYSTGQVSVEIEWELQKENSKRWNPEIQYTSNLCKSTNVDFAVNTDGTYSEPRPIGTRYLTRNL

SEQ ID NO: 889 - protein, 738 aa, synthetic construct
MAADGYLPDWLEDNLSEGIREWWDLKPGAPKPKANQQKQDDGRGLVLPGYKYLGPFNGLDKGEPVNAADAAALEHDKAYDQQLKAGDNPYLRYNHADAEFQERLQEDTSFGGNLGRAVFQAKKRVLEPLGLVEEGAKTAPGKKRPVEPSPQRSPDSSTGIGKKGQQPAKKRLNFGQTGDSESVPDPQPIGEPPAGPSGLGSGTMAAGGGAPMADNNEGADGVGSSSGNWHCDSTWLGDRVITTSTRTWALPTYNNHLYKQISNGTSGGSTNDNTYFGYSTPWGYFDFNRFHCHFSPRDWQRLINNNWGFRPKRLNFKLFNIQVKEVTQNEGTKTIANNLTSTIQVFADSEYQLPYVLGSAHQGCLPPFPADVFMIPQYGYLTLNNGSQAVGRSSFYCLEYFPSQMLRTGNNFEFSYQFEDVPFHSSYAHSQSLDRLMNPLIDQYLYYLSRTQSTGGTAGTQQLLFSQAGPNNMSAQAKNWLPGPCYRQQRVSTTLSQNNNSNFAWTGATKYHLNGRDSLVNPGVAMATHKDDEERFFPSSGVLMFGKQGAGKDNVDYSSVMLTSEEEIKTTNPVATEQYGVVADNLQQQNAAPIVGAVNSQGALPGMVWQNRDVYLQGPIWAKIPHTDGNFHPSPLMGGFGLKHPPPQILIKNTPVPADPPTTFSQAKLASFITQYSTGQVSVEIEWELQKENSKRWNPEIQYTSNLYKSTNVDFAVNTDGTYSEPRPIGTRYLTRNL

SEQ ID NO: 890 - protein, 738 aa, synthetic construct
MAADGYLPDWLEDNLSEGIREWWDLKPGAPKPKANQQKQDDGRGLVLPGYKYLGPFNGLDKGEPVNAADAAALEHDKAYDQQLKAGDNPYLRYNHADAEFQERLQEDTSFGGNLGRAVFQAKKRVLEPLGLVEEGAKTAPGKKRPVEPSPQRSPDSSTGIGKKGQQPAKKRLNFGQTGDSESVPDPQPIGEPPAGPSGLGSGTMAAGGGAPMADNNEGADGVGSSSGNWHCDSTWLGDRVITTSTRTWALPTYNNHLYKQISNGTSGGSTNDNTYFGYSTPWGYFDFNRFHCHFSPRDWQRLINNNWGFRPKRLNFKLFNIQVKEVTQNEGTKTIANNLTSTIQVFADSEYQLPYVLGSAHQGCLPPFPADVFMIPQYGYLTLNNGSQAVGRSSFYCLEYFPSQMLRTGNNFEFSYQFEDVPFHSSYAHSQSLDRLMNPLIDQYLYYLSRTQSTGGTAGTQQLLFSQAGPNNMSAQAKNWLPGPCYRQQRVSTTLSQNNNSNIAWTGATKYHLNGRDSLVNPGVAMATHKDDEERFFPSSGVLMFGKQGAGKDNVDYSSVMLTSEEEIKTTNPVATEQYGVVADNLQQQNAAPIVGAVNSQGALPGMVWQNRDVYLQGPIWAKIPHTDGNFHPSPLMGGFGLKHPPPQILIKNTPVPADPPTTFSQAKLASFITQYSTGQVSVEIEWELQKENSKRWNPEIQYTSNLYKSTNVDFAVNTDGTYSEPRPIGTRYLTRNL

SEQ ID NO: 891 - protein, 738 aa, synthetic construct
MAADGYLPDWLEDNLSEGIREWWDLKPGAPKPKANQQKQDDGRGLVLPGYKYLGPFNGLDKGEPVNAADAAALEHDKAYDQQLKAGDNPYLRYNHADAEFQERLQEDTSFGGNLGRAVFQAKKRVLEPLGLVEEGAKTAPGKKRPVEPSPQRSPDSSTGIGKKGQQPAKKRLNFGQTGDSESVPDPQPIGEPPAGPSGLGSGTMAAGGGAPMADNNEGADGVGSSSGNWHCDSTWLGDRVITTSTRTWALPTYNNHLYKQISNGTSGGSTNDNTYFGYSTPWGYFDFNRFHCHFSPRDWQRLINNNWGFRPKRLNFKLFNIQVKEVTQNEGTKTIANNLTSTIQVFADSEYQLPYVLGSAHQGCLPPFPADVFMIPQYGYLTLNNGSQAVGRSSFYCLEYFPSQMLRTGNNFEFSYQFEDVPFHSSYAHSQSLDRLMNPLIDQYLYYLSRTQSTGGTAGTQQLLFSQAGPNNMSAQAKNWLPGPCYRQQRVSTTLSQNNNSNFAWTRATKYHLNGRDSLVNPGVAMATHKDDEERFFPSSGVLMFGKQGAGKDNVDYSSVMLTSEEEIKTTNPVATEQYGVVADNLQQQNAAPIVGAVNSQGALPGMVWQNRDVYLQGPIWAKIPHTDGNFHPSPLMGGFGLKHPPPQILIKNTPVPADPPTTFSQAKLASFITQYSTGQVSVEIEWELQKENSKRWNPEIQYTSNLYKSTNVDFAVNTDGTYSEPRPIGTRYLTRNL

SEQ ID NO: 892 - protein, 738 aa, synthetic construct
MAADGYLPDWLEDNLSEGIREWWDLKPGAPKPKANQQKQDDGRGLVLPGYKYLGPFNGLDKGEPVNAADAAALEHDKAYDQQLKAGDNPYLRYNHADAEFQERLQEDTSFGGNLGRAVFQAKKRVLEPLGLVEEGAKTAPGKKRPVEPSPQRSPDSSTGIGKKGQQPAKKRLNFGQTGDSESVPDPQPIGEPPAGPSGLGSGTMAAGGGAPMADNNEGADGVGSSSGNWHCDSTWLGDRVITTSTRTWALPTYNNHLYKQISNGTSGGSTNDNTYFGYSTPWGYFDFNRFHCHFSPRDWQRLINNNWGFRPKRLNFKLFNIQVKEVTQNEGTKTIANNLTSTIQVFADSEYQLPYVLGSAHQGCLPPFPADVFMIPQYGYLTLNNGSQAVGRSSFYCLEYFPSQMLRTGNNFEFSYQFEDVPFHSSYAHSQSLDRLMNPLIDQYLYYLSRTQSTGGTAGTQQLLFSQAGPNNMSAQAKNWLPGPCYRQQRVSTTLSQNNNSNFAWTGATKYHLNGRDSLVNPGVAMATHKDDEERFFPSSGVLMFGKQGAGKDNVDYSSVMLTSEEEIKTTNPVATEQYGVVADNLQQQNAAPIVGAVNSQGALPGMVWQNRDVYLQGPIWAKIPHTDGNFHPSPLMGGFGLKHPPPQILIKNTPVPADPPTTFSQAKLASFITQYSTGQVSVEIEWELQKENSKRWNPEIQYTSNLCKSTNVDFAVNTDGTYSEPRPIGTRYLTRNL

SEQ ID NO: 893 - protein, 738 aa, synthetic construct
MAADGYLPDWLEDNLSEGIREWWDLKPGAPKPKANQQKQDDGRGLVLPGYKYLGPFNGLDKGEPVNAADAAALEHDKAYDQQLKAGDNPYLRYNHADAEFQERLQEDTSFGGNLGRAVFQAKKRVLEPLGLVEEGAKTAPGKKRPVEPSPQRSPDSSTGIGKKGQQPAKKRLNFGQTGDSESVPDPQPIGEPPAGPSGLGSGTMAAGGGAPMADNNEGADGVGSSSGNWHCDSTWLGDRVITTSTRTWALPTYNNHLYKQISNGTSGGSTNDNTYFGYSTPWGYFDFNRFHCHFSPRDWQRLINNNWGFRPKRLNFKLFNIQVKEVTQNEGTKTIANNLTSTIQVFADSEYQLPYVLGSAHQGCLPPFPADVFMIPQYGYLTLNNGSQAVGRSSFYCLEYFPSQMLRTGNNFEFSYQFEDVPFHSSYAHSQSLDRLMNPLIDQYLYYLSRTQSTGGTAGTQQLLFSQAGPNNMSAQAKNWLPGPCYRQQRVSTTLSQNNNSNIAWTRATKYHLNGRDSLVNPGVAMATHKDDEERFFPSSGVLMFGKQGAGKDNVDYSSVMLTSEEEIKTTNPVATEQYGVVADNLQQQNAAPIVGAVNSQGALPGMVWQNRDVYLQGPIWAKIPHTDGNFHPSPLMGGFGLKHPPPQILIKNTPVPADPPTTFSQAKLASFITQYSTGQVSVEIEWELQKENSKRWNPEIQYTSNLYKSTNVDFAVNTDGTYSEPRPIGTRYLTRNL

SEQ ID NO: 894 - protein, 738 aa, synthetic construct
MAADGYLPDWLEDNLSEGIREWWDLKPGAPKPKANQQKQDDGRGLVLPGYKYLGPFNGLDKGEPVNAADAAALEHDKAYDQQLKAGDNPYLRYNHADAEFQERLQEDTSFGGNLGRAVFQAKKRVLEPLGLVEEGAKTAPGKKRPVEPSPQRSPDSSTGIGKKGQQPAKKRLNFGQTGDSESVPDPQPIGEPPAGPSGLGSGTMAAGGGAPMADNNEGADGVGSSSGNWHCDSTWLGDRVITTSTRTWALPTYNNHLYKQISNGTSGGSTNDNTYFGYSTPWGYFDFNRFHCHFSPRDWQRLINNNWGFRPKRLNFKLFNIQVKEVTQNEGTKTIANNLTSTIQVFADSEYQLPYVLGSAHQGCLPPFPADVFMIPQYGYLTLNNGSQAVGRSSFYCLEYFPSQMLRTGNNFEFSYQFEDVPFHSSYAHSQSLDRLMNPLIDQYLYYLSRTQSTGGTAGTQQLLFSQAGPNNMSAQAKNWLPGPCYRQQRVSTTLSQNNNSNIAWTGATKYHLNGRDSLVNPGVAMATHKDDEERFFPSSGVLMFGKQGAGKDNVDYSSVMLTSEEEIKTTNPVATEQYGVVADNLQQQNAAPIVGAVNSQGALPGMVWQNRDVYLQGPIWAKIPHTDGNFHPSPLMGGFGLKHPPPQILIKNTPVPADPPTTFSQAKLASFITQYSTGQVSVEIEWELQKENSKRWNPEIQYTSNLCKSTNVDFAVNTDGTYSEPRPIGTRYLTRNL

SEQ ID NO: 895 - protein, 738 aa, synthetic construct
MAADGYLPDWLEDNLSEGIREWWDLKPGAPKPKANQQKQDDGRGLVLPGYKYLGPFNGLDKGEPVNAADAAALEHDKAYDQQLKAGDNPYLRYNHADAEFQERLQEDTSFGGNLGRAVFQAKKRVLEPLGLVEEGAKTAPGKKRPVEPSPQRSPDSSTGIGKKGQQPAKKRLNFGQTGDSESVPDPQPIGEPPAGPSGLGSGTMAAGGGAPMADNNEGADGVGSSSGNWHCDSTWLGDRVITTSTRTWALPTYNNHLYKQISNGTSGGSTNDNTYFGYSTPWGYFDFNRFHCHFSPRDWQRLINNNWGFRPKRLNFKLFNIQVKEVTQNEGTKTIANNLTSTIQVFADSEYQLPYVLGSAHQGCLPPFPADVFMIPQYGYLTLNNGSQAVGRSSFYCLEYFPSQMLRTGNNFEFSYQFEDVPFHSSYAHSQSLDRLMNPLIDQYLYYLSRTQSTGGTAGTQQLLFSQAGPNNMSAQAKNWLPGPCYRQQRVSTTLSQNNNSNFAWTRATKYHLNGRDSLVNPGVAMATHKDDEERFFPSSGVLMFGKQGAGKDNVDYSSVMLTSEEEIKTTNPVATEQYGVVADNLQQQNAAPIVGAVNSQGALPGMVWQNRDVYLQGPIWAKIPHTDGNFHPSPLMGGFGLKHPPPQILIKNTPVPADPPTTFSQAKLASFITQYSTGQVSVEIEWELQKENSKRWNPEIQYTSNLCKSTNVDFAVNTDGTYSEPRPIGTRYLTRNL

SEQ ID NO: 896 - protein, 738 aa, synthetic construct
MAADGYLPDWLEDNLSEGIREWWDLKPGAPKPKANQQKQDDGRGLVLPGYKYLGPFNGLDKGEPVNAADAAALEHDKAYDQQLKAGDNPYLRYNHADAEFQERLQEDTSFGGNLGRAVFQAKKRVLEPLGLVEEGAKTAPGKKRPVEPSPQRSPDSSTGIGKKGQQPAKKRLNFGQTGDSESVPDPQPIGEPPAGPSGLGSGTMAAGGGAPMADNNEGADGVGSSSGNWHCDSTWLGDRVITTSTRTWALPTYNNHLYKQISNGTSGGSTNDNTYFGYSTPWGYFDFNRFHCHFSPRDWQRLINNNWGFRPKRLNFKLFNIQVKEVTQNEGTKTIANNLTSTIQVFADSEYQLPYVLGSAHQGCLPPFPADVFMIPQYGYLTLNNGSQAVGRSSFYCLEYFPSQMLRTGNNFEFSYQFEDVPFHSSYAHSQSLDRLMNPLIDQYLYYLSRTQSTGGTAGTQQLLFSQAGPNNMSAQAKNWLPGPCYRQQRVSTTLSQNNNSNIAWTRATKYHLNGRDSLVNPGVAMATHKDDEERFFPSSGVLMFGKQGAGKDNVDYSSVMLTSEEEIKTTNPVATEQYGVVADNLQQQNAAPIVGAVNSQGALPGMVWQNRDVYLQGPIWAKIPHTDGNFHPSPLMGGFGLKHPPPQILIKNTPVPADPPTTFSQAKLASFITQYSTGQVSVEIEWELQKENSKRWNPEIQYTSNLCKSTNVDFAVNTDGTYSEPRPIGTRYLTRNL

SEQ ID NO: 897 - protein, 736 aa, synthetic construct
MAADGYLPDWLEDNLSEGIREWWALQPGAPKPKANQQHQDNARGLVLPGYKYLGPGNGLDKGEPVNAADAAALEHDKAYDQQLKAGDNPYLKYNHADAEFQERLKEDTSFGGNLGRAVFQAKKRLLEPLGLVEEAAKTAPGKKRPVDQSPQEPDSSSGVGKSGKQPARKRLNFGQTGDSESVPDPQPLGEPPAAPTSLGSNTMASGGGAPMADNNEGADGVGNSSGNWHCDSQWLGDRVITTSTRTWALPTYNNHLYKQISSQSGASNDNHYFGYSTPWGYFDFNRFHCHFSPRDWQRLINNNWGFRPKKLSFKLFNIQVKEVTQNDGTTTIANNLTSTVQVFGDSEYQLPYVLGSAHQGCLPPFPADVFMVPQYGYLTLNNGSQAVGRSSFYCLEYFPSQMLRTGNNFQFSYTFEDVPFHSSYAHSQSLDRLMNPLIDQYLYYLNRTQGTTSGTTNQSRLLFSQAGPQSMSLQARNWLPGPCYRQQRLSKTANDNNNSNFPWTAASKYHLNGRDSLVNPGPAMASHKDDEEKFFPMHGNLIFGKEGTTASNAELDNVMITDEEEIRTTNPVATEQYGTVANNLQSSNTAPTTRTVNDQGALPGMVWQDRDVYLQGPIWAKIPHTDGHFHPSPLMGGFGLKHPPPQIMIKNTPVPANPPTTFSPAKFASFITQYSTGQVSVEIEWELQKENSKRWNPEIQYTSNYNKSVNVDFTVDTNGVYSEPRPIGTRYLTRPL

SEQ ID NO: 898 - protein, 736 aa, synthetic construct
MAADGYLPDWLEDNLSEGIREWWALQPGAPKPKANQQHQDNARGLVLPGYKYLGPGNGLDKGEPVNAADAAALEHDKAYDQQLKAGDNPYLKYNHADAEFQERLKEDTSFGGNLGRAVFQAKKRLLEPLGLVEEAAKTAPGKKRPVDQSPQEPDSSSGVGKSGKQPARKRLNFGQTGDSESVPDPQPLGEPPAAPTSLGSNTMASGGGAPMADNNEGADGVGNSSGNWHCDSQWLGDRVITTSTRTWALPTYNNHLYKQISSQSGASNDNHYFGYSTPWGYFDFNRFHCHFSPRDWQRLINNNWGFRPKKLSFKLFNIQVKEVTQNDGTTTIANNLTSTVQVFGDSEYQLPYVLGSAHQGCLPPFPADVFMVPQYGYLTLNNGSQAVGRSSFYCLEYFPSQMLRTGNNFQFSYTFEDVPFHSSYAHSQSLDRLMNPLIDQYLYYLNRTQGTTSGTTNQSRLLFSQAGPQSMSLQARNWLPGPCYRQQRLSKTANDNNNSNIPWTAASKYHLNGRDSLVNPGPAMASHKDDEEKFFPMHGNLIFGKEGTTASNAELDNVMITDEEEIRTTNPVATEQYGTVANNLQSSNTAPTTRTVNDQGALPGMVWQDRDVYLQGPIWAKIPHTDGHFHPSPLMGGFGLKHPPPQIMIKNTPVPANPPTTFSPAKFASFITQYSTGQVSVEIEWELQKENSKRWNPEIQYTSNYNKSVNVDFTVDTNGVYSEPRPIGTRYLTRPL

SEQ ID NO: 899 - protein, 736 aa, synthetic construct
MAADGYLPDWLEDNLSEGIREWWALQPGAPKPKANQQHQDNARGLVLPGYKYLGPGNGLDKGEPVNAADAAALEHDKAYDQQLKAGDNPYLKYNHADAEFQERLKEDTSFGGNLGRAVFQAKKRLLEPLGLVEEAAKTAPGKKRPVDQSPQEPDSSSGVGKSGKQPARKRLNFGQTGDSESVPDPQPLGEPPAAPTSLGSNTMASGGGAPMADNNEGADGVGNSSGNWHCDSQWLGDRVITTSTRTWALPTYNNHLYKQISSQSGASNDNHYFGYSTPWGYFDFNRFHCHFSPRDWQRLINNNWGFRPKKLSFKLFNIQVKEVTQNDGTTTIANNLTSTVQVFGDSEYQLPYVLGSAHQGCLPPFPADVFMVPQYGYLTLNNGSQAVGRSSFYCLEYFPSQMLRTGNNFQFSYTFEDVPFHSSYAHSQSLDRLMNPLIDQYLYYLNRTQGTTSGTTNQSRLLFSQAGPQSMSLQARNWLPGPCYRQQRLSKTANDNNNSNFPWTRASKYHLNGRDSLVNPGPAMASHKDDEEKFFPMHGNLIFGKEGTTASNAELDNVMITDEEEIRTTNPVATEQYGTVANNLQSSNTAPTTRTVNDQGALPGMVWQDRDVYLQGPIWAKIPHTDGHFHPSPLMGGFGLKHPPPQIMIKNTPVPANPPTTFSPAKFASFITQYSTGQVSVEIEWELQKENSKRWNPEIQYTSNYNKSVNVDFTVDTNGVYSEPRPIGTRYLTRPL

SEQ ID NO: 900 - protein, 736 aa, synthetic construct
MAADGYLPDWLEDNLSEGIREWWALQPGAPKPKANQQHQDNARGLVLPGYKYLGPGNGLDKGEPVNAADAAALEHDKAYDQQLKAGDNPYLKYNHADAEFQERLKEDTSFGGNLGRAVFQAKKRLLEPLGLVEEAAKTAPGKKRPVDQSPQEPDSSSGVGKSGKQPARKRLNFGQTGDSESVPDPQPLGEPPAAPTSLGSNTMASGGGAPMADNNEGADGVGNSSGNWHCDSQWLGDRVITTSTRTWALPTYNNHLYKQISSQSGASNDNHYFGYSTPWGYFDFNRFHCHFSPRDWQRLINNNWGFRPKKLSFKLFNIQVKEVTQNDGTTTIANNLTSTVQVFGDSEYQLPYVLGSAHQGCLPPFPADVFMVPQYGYLTLNNGSQAVGRSSFYCLEYFPSQMLRTGNNFQFSYTFEDVPFHSSYAHSQSLDRLMNPLIDQYLYYLNRTQGTTSGTTNQSRLLFSQAGPQSMSLQARNWLPGPCYRQQRLSKTANDNNNSNFPWTAASKYHLNGRDSLVNPGPAMASHKDDEEKFFPMHGNLIFGKEGTTASNAELDNVMITDEEEIRTTNPVATEQYGTVANNLQSSNTAPTTRTVNDQGALPGMVWQDRDVYLQGPIWAKIPHTDGHFHPSPLMGGFGLKHPPPQIMIKNTPVPANPPTTFSPAKFASFITQYSTGQVSVEIEWELQKENSKRWNPEIQYTSNYCKSVNVDFTVDTNGVYSEPRPIGTRYLTRPL

SEQ ID NO: 901 - protein, 736 aa, synthetic construct
MAADGYLPDWLEDNLSEGIREWWALQPGAPKPKANQQHQDNARGLVLPGYKYLGPGNGLDKGEPVNAADAAALEHDKAYDQQLKAGDNPYLKYNHADAEFQERLKEDTSFGGNLGRAVFQAKKRLLEPLGLVEEAAKTAPGKKRPVDQSPQEPDSSSGVGKSGKQPARKRLNFGQTGDSESVPDPQPLGEPPAAPTSLGSNTMASGGGAPMADNNEGADGVGNSSGNWHCDSQWLGDRVITTSTRTWALPTYNNHLYKQISSQSGASNDNHYFGYSTPWGYFDFNRFHCHFSPRDWQRLINNNWGFRPKKLSFKLFNIQVKEVTQNDGTTTIANNLTSTVQVFGDSEYQLPYVLGSAHQGCLPPFPADVFMVPQYGYLTLNNGSQAVGRSSFYCLEYFPSQMLRTGNNFQFSYTFEDVPFHSSYAHSQSLDRLMNPLIDQYLYYLNRTQGTTSGTTNQSRLLFSQAGPQSMSLQARNWLPGPCYRQQRLSKTANDNNNSNIPWTRASKYHLNGRDSLVNPGPAMASHKDDEEKFFPMHGNLIFGKEGTTASNAELDNVMITDEEEIRTTNPVATEQYGTVANNLQSSNTAPTTRTVNDQGALPGMVWQDRDVYLQGPIWAKIPHTDGHFHPSPLMGGFGLKHPPPQIMIKNTPVPANPPTTFSPAKFASFITQYSTGQVSVEIEWELQKENSKRWNPEIQYTSNYNKSVNVDFTVDTNGVYSEPRPIGTRYLTRPL

SEQ ID NO: 902 - protein, 736 aa, synthetic construct
MAADGYLPDWLEDNLSEGIREWWALQPGAPKPKANQQHQDNARGLVLPGYKYLGPGNGLDKGEPVNAADAAALEHDKAYDQQLKAGDNPYLKYNHADAEFQERLKEDTSFGGNLGRAVFQAKKRLLEPLGLVEEAAKTAPGKKRPVDQSPQEPDSSSGVGKSGKQPARKRLNFGQTGDSESVPDPQPLGEPPAAPTSLGSNTMASGGGAPMADNNEGADGVGNSSGNWHCDSQWLGDRVITTSTRTWALPTYNNHLYKQISSQSGASNDNHYFGYSTPWGYFDFNRFHCHFSPRDWQRLINNNWGFRPKKLSFKLFNIQVKEVTQNDGTTTIANNLTSTVQVFGDSEYQLPYVLGSAHQGCLPPFPADVFMVPQYGYLTLNNGSQAVGRSSFYCLEYFPSQMLRTGNNFQFSYTFEDVPFHSSYAHSQSLDRLMNPLIDQYLYYLNRTQGTTSGTTNQSRLLFSQAGPQSMSLQARNWLPGPCYRQQRLSKTANDNNNSNIPWTAASKYHLNGRDSLVNPGPAMASHKDDEEKFFPMHGNLIFGKEGTTASNAELDNVMITDEEEIRTTNPVATEQYGTVANNLQSSNTAPTTRTVNDQGALPGMVWQDRDVYLQGPIWAKIPHTDGHFHPSPLMGGFGLKHPPPQIMIKNTPVPANPPTTFSPAKFASFITQYSTGQVSVEIEWELQKENSKRWNPEIQYTSNYCKSVNVDFTVDTNGVYSEPRPIGTRYLTRPL

SEQ ID NO: 903 - protein, 736 aa, synthetic construct
MAADGYLPDWLEDNLSEGIREWWALQPGAPKPKANQQHQDNARGLVLPGYKYLGPGNGLDKGEPVNAADAAALEHDKAYDQQLKAGDNPYLKYNHADAEFQERLKEDTSFGGNLGRAVFQAKKRLLEPLGLVEEAAKTAPGKKRPVDQSPQEPDSSSGVGKSGKQPARKRLNFGQTGDSESVPDPQPLGEPPAAPTSLGSNTMASGGGAPMADNNEGADGVGNSSGNWHCDSQWLGDRVITTSTRTWALPTYNNHLYKQISSQSGASNDNHYFGYSTPWGYFDFNRFHCHFSPRDWQRLINNNWGFRPKKLSFKLFNIQVKEVTQNDGTTTIANNLTSTVQVFGDSEYQLPYVLGSAHQGCLPPFPADVFMVPQYGYLTLNNGSQAVGRSSFYCLEYFPSQMLRTGNNFQFSYTFEDVPFHSSYAHSQSLDRLMNPLIDQYLYYLNRTQGTTSGTTNQSRLLFSQAGPQSMSLQARNWLPGPCYRQQRLSKTANDNNNSNFPWTRASKYHLNGRDSLVNPGPAMASHKDDEEKFFPMHGNLIFGKEGTTASNAELDNVMITDEEEIRTTNPVATEQYGTVANNLQSSNTAPTTRTVNDQGALPGMVWQDRDVYLQGPIWAKIPHTDGHFHPSPLMGGFGLKHPPPQIMIKNTPVPANPPTTFSPAKFASFITQYSTGQVSVEIEWELQKENSKRWNPEIQYTSNYCKSVNVDFTVDTNGVYSEPRPIGTRYLTRPL

SEQ ID NO: 904 - protein, 736 aa, synthetic construct
MAADGYLPDWLEDNLSEGIREWWALQPGAPKPKANQQHQDNARGLVLPGYKYLGPGNGLDKGEPVNAADAAALEHDKAYDQQLKAGDNPYLKYNHADAEFQERLKEDTSFGGNLGRAVFQAKKRLLEPLGLVEEAAKTAPGKKRPVDQSPQEPDSSSGVGKSGKQPARKRLNFGQTGDSESVPDPQPLGEPPAAPTSLGSNTMASGGGAPMADNNEGADGVGNSSGNWHCDSQWLGDRVITTSTRTWALPTYNNHLYKQISSQSGASNDNHYFGYSTPWGYFDFNRFHCHFSPRDWQRLINNNWGFRPKKLSFKLFNIQVKEVTQNDGTTTIANNLTSTVQVFGDSEYQLPYVLGSAHQGCLPPFPADVFMVPQYGYLTLNNGSQAVGRSSFYCLEYFPSQMLRTGNNFQFSYTFEDVPFHSSYAHSQSLDRLMNPLIDQYLYYLNRTQGTTSGTTNQSRLLFSQAGPQSMSLQARNWLPGPCYRQQRLSKTANDNNNSNIPWTRASKYHLNGRDSLVNPGPAMASHKDDEEKFFPMHGNLIFGKEGTTASNAELDNVMITDEEEIRTTNPVATEQYGTVANNLQSSNTAPTTRTVNDQGALPGMVWQDRDVYLQGPIWAKIPHTDGHFHPSPLMGGFGLKHPPPQIMIKNTPVPANPPTTFSPAKFASFITQYSTGQVSVEIEWELQKENSKRWNPEIQYTSNYCKSVNVDFTVDTNGVYSEPRPIGTRYLTRPL

SEQ ID NO: 905 - protein, 736 aa, synthetic construct
MAADGYLPDWLEDNLSEGIREWWALQPGAPKPKANQQHQDNARGLVLPGYKYLGPGNGLDKGEPVNAADAAALEHDKAYDQQLKAGDNPYLKYNHADAEFQERLKEDTSFGGNLGRAVFQAKKRLLEPLGLVEEAAKTAPGKKRPVDQSPQEPDSSSGVGKSGKQPARKRLNFGQTGDSESVPDPQPLGEPPAAPTSLGSNTMASGGGAPMADNNEGADGVGNSSGNWHCDSQWLGDRVITTSTRTWALPTYNNHLYKQISSQSGASNDNHYFGYSTPWGYFDFNRFHCHFSPRDWQRLINNNWGFRPKKLSFKLFNIQVKEVTQNDGTTTIANNLTSTVQVFTDSEYQLPYVLGSAHQGCLPPFPADVFMVPQYGYLTLNNGSQAVGRSSFYCLEYFPSQMLRTGNNFQFSYTFEDVPFHSSYAHSQSLDRLMNPLIDQYLYYLNRTQGTTSGTTNQSRLLFSQAGPQSMSLQARNWLPGPCYRQQRLSKTANDNNNSNFPWTAASKYHLNGRDSLVNPGPAMASHKDDEEKFFPMHGNLIFGKEGTTASNAELDNVMITDEEEIRTTNPVATEQYGTVANNLQSSNTAPTTRTVNDQGALPGMVWQDRDVYLQGPIWAKIPHTDGHFHPSPLMGGFGLKHPPPQIMIKNTPVPANPPTTFSPAKFASFITQYSTGQVSVEIEWELQKENSKRWNPEIQYTSNLNKSVNVDFTVDTNGVYSEPRPIGTRYLTRPL

SEQ ID NO: 906 - protein, 736 aa, synthetic construct
MAADGYLPDWLEDNLSEGIREWWALQPGAPKPKANQQHQDNARGLVLPGYKYLGPGNGLDKGEPVNAADAAALEHDKAYDQQLKAGDNPYLKYNHADAEFQERLKEDTSFGGNLGRAVFQAKKRLLEPLGLVEEAAKTAPGKKRPVDQSPQEPDSSSGVGKSGKQPARKRLNFGQTGDSESVPDPQPLGEPPAAPTSLGSNTMASGGGAPMADNNEGADGVGNSSGNWHCDSQWLGDRVITTSTRTWALPTYNNHLYKQISSQSGASNDNHYFGYSTPWGYFDFNRFHCHFSPRDWQRLINNNWGFRPKKLSFKLFNIQVKEVTQNDGTTTIANNLTSTVQVFTDSEYQLPYVLGSAHQGCLPPFPADVFMVPQYGYLTLNNGSQAVGRSSFYCLEYFPSQMLRTGNNFQFSYTFEDVPFHSSYAHSQSLDRLMNPLIDQYLYYLNRTQGTTSGTTNQSRLLFSQAGPQSMSLQARNWLPGPCYRQQRLSKTANDNNNSNIPWTAASKYHLNGRDSLVNPGPAMASHKDDEEKFFPMHGNLIFGKEGTTASNAELDNVMITDEEEIRTTNPVATEQYGTVANNLQSSNTAPTTRTVNDQGALPGMVWQDRDVYLQGPIWAKIPHTDGHFHPSPLMGGFGLKHPPPQIMIKNTPVPANPPTTFSPAKFASFITQYSTGQVSVEIEWELQKENSKRWNPEIQYTSNLNKSVNVDFTVDTNGVYSEPRPIGTRYLTRPL

SEQ ID NO: 907 - protein, 736 aa, synthetic construct
MAADGYLPDWLEDNLSEGIREWWALQPGAPKPKANQQHQDNARGLVLPGYKYLGPGNGLDKGEPVNAADAAALEHDKAYDQQLKAGDNPYLKYNHADAEFQERLKEDTSFGGNLGRAVFQAKKRLLEPLGLVEEAAKTAPGKKRPVDQSPQEPDSSSGVGKSGKQPARKRLNFGQTGDSESVPDPQPLGEPPAAPTSLGSNTMASGGGAPMADNNEGADGVGNSSGNWHCDSQWLGDRVITTSTRTWALPTYNNHLYKQISSQSGASNDNHYFGYSTPWGYFDFNRFHCHFSPRDWQRLINNNWGFRPKKLSFKLFNIQVKEVTQNDGTTTIANNLTSTVQVFTDSEYQLPYVLGSAHQGCLPPFPADVFMVPQYGYLTLNNGSQAVGRSSFYCLEYFPSQMLRTGNNFQFSYTFEDVPFHSSYAHSQSLDRLMNPLIDQYLYYLNRTQGTTSGTTNQSRLLFSQAGPQSMSLQARNWLPGPCYRQQRLSKTANDNNNSNFPWTRASKYHLNGRDSLVNPGPAMASHKDDEEKFFPMHGNLIFGKEGTTASNAELDNVMITDEEEIRTTNPVATEQYGTVANNLQSSNTAPTTRTVNDQGALPGMVWQDRDVYLQGPIWAKIPHTDGHFHPSPLMGGFGLKHPPPQIMIKNTPVPANPPTTFSPAKFASFITQYSTGQVSVEIEWELQKENSKRWNPEIQYTSNLNKSVNVDFTVDTNGVYSEPRPIGTRYLTRPL

SEQ ID NO: 908 - protein, 736 aa, synthetic construct
MAADGYLPDWLEDNLSEGIREWWALQPGAPKPKANQQHQDNARGLVLPGYKYLGPGNGLDKGEPVNAADAAALEHDKAYDQQLKAGDNPYLKYNHADAEFQERLKEDTSFGGNLGRAVFQAKKRLLEPLGLVEEAAKTAPGKKRPVDQSPQEPDSSSGVGKSGKQPARKRLNFGQTGDSESVPDPQPLGEPPAAPTSLGSNTMASGGGAPMADNNEGADGVGNSSGNWHCDSQWLGDRVITTSTRTWALPTYNNHLYKQISSQSGASNDNHYFGYSTPWGYFDFNRFHCHFSPRDWQRLINNNWGFRPKKLSFKLFNIQVKEVTQNDGTTTIANNLTSTVQVFTDSEYQLPYVLGSAHQGCLPPFPADVFMVPQYGYLTLNNGSQAVGRSSFYCLEYFPSQMLRTGNNFQFSYTFEDVPFHSSYAHSQSLDRLMNPLIDQYLYYLNRTQGTTSGTTNQSRLLFSQAGPQSMSLQARNWLPGPCYRQQRLSKTANDNNNSNFPWTAASKYHLNGRDSLVNPGPAMASHKDDEEKFFPMHGNLIFGKEGTTASNAELDNVMITDEEEIRTTNPVATEQYGTVANNLQSSNTAPTTRTVNDQGALPGMVWQDRDVYLQGPIWAKIPHTDGHFHPSPLMGGFGLKHPPPQIMIKNTPVPANPPTTFSPAKFASFITQYSTGQVSVEIEWELQKENSKRWNPEIQYTSNLCKSVNVDFTVDTNGVYSEPRPIGTRYLTRPL

SEQ ID NO: 909 - protein, 736 aa, synthetic construct
MAADGYLPDWLEDNLSEGIREWWALQPGAPKPKANQQHQDNARGLVLPGYKYLGPGNGLDKGEPVNAADAAALEHDKAYDQQLKAGDNPYLKYNHADAEFQERLKEDTSFGGNLGRAVFQAKKRLLEPLGLVEEAAKTAPGKKRPVDQSPQEPDSSSGVGKSGKQPARKRLNFGQTGDSESVPDPQPLGEPPAAPTSLGSNTMASGGGAPMADNNEGADGVGNSSGNWHCDSQWLGDRVITTSTRTWALPTYNNHLYKQISSQSGASNDNHYFGYSTPWGYFDFNRFHCHFSPRDWQRLINNNWGFRPKKLSFKLFNIQVKEVTQNDGTTTIANNLTSTVQVFTDSEYQLPYVLGSAHQGCLPPFPADVFMVPQYGYLTLNNGSQAVGRSSFYCLEYFPSQMLRTGNNFQFSYTFEDVPFHSSYAHSQSLDRLMNPLIDQYLYYLNRTQGTTSGTTNQSRLLFSQAGPQSMSLQARNWLPGPCYRQQRLSKTANDNNNSNIPWTRASKYHLNGRDSLVNPGPAMASHKDDEEKFFPMHGNLIFGKEGTTASNAELDNVMITDEEEIRTTNPVATEQYGTVANNLQSSNTAPTTRTVNDQGALPGMVWQDRDVYLQGPIWAKIPHTDGHFHPSPLMGGFGLKHPPPQIMIKNTPVPANPPTTFSPAKFASFITQYSTGQVSVEIEWELQKENSKRWNPEIQYTSNLNKSVNVDFTVDTNGVYSEPRPIGTRYLTRPL

SEQ ID NO: 910 - protein, 736 aa, synthetic construct
MAADGYLPDWLEDNLSEGIREWWALQPGAPKPKANQQHQDNARGLVLPGYKYLGPGNGLDKGEPVNAADAAALEHDKAYDQQLKAGDNPYLKYNHADAEFQERLKEDTSFGGNLGRAVFQAKKRLLEPLGLVEEAAKTAPGKKRPVDQSPQEPDSSSGVGKSGKQPARKRLNFGQTGDSESVPDPQPLGEPPAAPTSLGSNTMASGGGAPMADNNEGADGVGNSSGNWHCDSQWLGDRVITTSTRTWALPTYNNHLYKQISSQSGASNDNHYFGYSTPWGYFDFNRFHCHFSPRDWQRLINNNWGFRPKKLSFKLFNIQVKEVTQNDGTTTIANNLTSTVQVFTDSEYQLPYVLGSAHQGCLPPFPADVFMVPQYGYLTLNNGSQAVGRSSFYCLEYFPSQMLRTGNNFQFSYTFEDVPFHSSYAHSQSLDRLMNPLIDQYLYYLNRTQGTTSGTTNQSRLLFSQAGPQSMSLQARNWLPGPCYRQQRLSKTANDNNNSNIPWTAASKYHLNGRDSLVNPGPAMASHKDDEEKFFPMHGNLIFGKEGTTASNAELDNVMITDEEEIRTTNPVATEQYGTVANNLQSSNTAPTTRTVNDQGALPGMVWQDRDVYLQGPIWAKIPHTDGHFHPSPLMGGFGLKHPPPQIMIKNTPVPANPPTTFSPAKFASFITQYSTGQVSVEIEWELQKENSKRWNPEIQYTSNLCKSVNVDFTVDTNGVYSEPRPIGTRYLTRPL

SEQ ID NO: 911 - protein, 736 aa, synthetic construct
MAADGYLPDWLEDNLSEGIREWWALQPGAPKPKANQQHQDNARGLVLPGYKYLGPGNGLDKGEPVNAADAAALEHDKAYDQQLKAGDNPYLKYNHADAEFQERLKEDTSFGGNLGRAVFQAKKRLLEPLGLVEEAAKTAPGKKRPVDQSPQEPDSSSGVGKSGKQPARKRLNFGQTGDSESVPDPQPLGEPPAAPTSLGSNTMASGGGAPMADNNEGADGVGNSSGNWHCDSQWLGDRVITTSTRTWALPTYNNHLYKQISSQSGASNDNHYFGYSTPWGYFDFNRFHCHFSPRDWQRLINNNWGFRPKKLSFKLFNIQVKEVTQNDGTTTIANNLTSTVQVFTDSEYQLPYVLGSAHQGCLPPFPADVFMVPQYGYLTLNNGSQAVGRSSFYCLEYFPSQMLRTGNNFQFSYTFEDVPFHSSYAHSQSLDRLMNPLIDQYLYYLNRTQGTTSGTTNQSRLLFSQAGPQSMSLQARNWLPGPCYRQQRLSKTANDNNNSNFPWTRASKYHLNGRDSLVNPGPAMASHKDDEEKFFPMHGNLIFGKEGTTASNAELDNVMITDEEEIRTTNPVATEQYGTVANNLQSSNTAPTTRTVNDQGALPGMVWQDRDVYLQGPIWAKIPHTDGHFHPSPLMGGFGLKHPPPQIMIKNTPVPANPPTTFSPAKFASFITQYSTGQVSVEIEWELQKENSKRWNPEIQYTSNLCKSVNVDFTVDTNGVYSEPRPIGTRYLTRPL

SEQ ID NO: 912 - protein, 736 aa, synthetic construct
MAADGYLPDWLEDNLSEGIREWWALQPGAPKPKANQQHQDNARGLVLPGYKYLGPGNGLDKGEPVNAADAAALEHDKAYDQQLKAGDNPYLKYNHADAEFQERLKEDTSFGGNLGRAVFQAKKRLLEPLGLVEEAAKTAPGKKRPVDQSPQEPDSSSGVGKSGKQPARKRLNFGQTGDSESVPDPQPLGEPPAAPTSLGSNTMASGGGAPMADNNEGADGVGNSSGNWHCDSQWLGDRVITTSTRTWALPTYNNHLYKQISSQSGASNDNHYFGYSTPWGYFDFNRFHCHFSPRDWQRLINNNWGFRPKKLSFKLFNIQVKEVTQNDGTTTIANNLTSTVQVFTDSEYQLPYVLGSAHQGCLPPFPADVFMVPQYGYLTLNNGSQAVGRSSFYCLEYFPSQMLRTGNNFQFSYTFEDVPFHSSYAHSQSLDRLMNPLIDQYLYYLNRTQGTTSGTTNQSRLLFSQAGPQSMSLQARNWLPGPCYRQQRLSKTANDNNNSNIPWTRASKYHLNGRDSLVNPGPAMASHKDDEEKFFPMHGNLIFGKEGTTASNAELDNVMITDEEEIRTTNPVATEQYGTVANNLQSSNTAPTTRTVNDQGALPGMVWQDRDVYLQGPIWAKIPHTDGHFHPSPLMGGFGLKHPPPQIMIKNTPVPANPPTTFSPAKFASFITQYSTGQVSVEIEWELQKENSKRWNPEIQYTSNLCKSVNVDFTVDTNGVYSEPRPIGTRYLTRPL

SEQ ID NO: 913 - protein, 736 aa, synthetic construct
MAADGYLPDWLEDNLSEGIREWWALQPGAPKPKANQQHQDNARGLVLPGYKYLGPGNGLDKGEPVNAADAAALEHDKAYDQQLKAGDNPYLKYNHADAEFQERLKEDTSFGGNLGRAVFQAKKRLLEPLGLVEEAAKTAPGKKRPVDQSPQEPDSSSGVGKSGKQPARKRLNFGQTGDSESVPDPQPLGEPPAAPTSLGSNTMASGGGAPMADNNEGADGVGNSSGNWHCDSQWLGDRVITTSTRTWALPTYNNHLYKQISSQSGASNDNHYFGYSTPWGYFDFNRFHCHFSPRDWQRLINNNWGFRPKKLSFKLFNIQVKEVTQNDGTTTIANNLTSTVQVFGDSEYQLPYVLGSAHQGCLPPFPADVFMVPQYGYLTLNNGSQAVGRSSFYCLEYFPSQMLRTGNNFQFSYTFEDVPFHSSYAHSQSLDRLMNPLIDQYLYYLNRTQGTTSGTTNQSRLLFSQAGPQSMSLQARNWLPGPCYRQQRLSKTANDNNNSNFPWTAASKYHLNGRDSLVNPGPAMASHKDDEEKFFPMHGNLIFGKEGTTASNAELDNVMITDEEEIRTTNPVATEQYGTVANNLQSSNTAPTTRTVNDQGALPGMVWQDRDVYLQGPIWAKIPHTDGHFHPSPLMGGFGLKHPPPQIMIKNTPVPANPPTTFSPAKFASFITQYSTGQVSVEIEWELQKENSKRWNPEIQYTSNLNKSVNVDFTVDTNGVYSEPRPIGTRYLTRPL

SEQ ID NO: 914 - protein, 736 aa, synthetic construct
MAADGYLPDWLEDNLSEGIREWWALQPGAPKPKANQQHQDNARGLVLPGYKYLGPGNGLDKGEPVNAADAAALEHDKAYDQQLKAGDNPYLKYNHADAEFQERLKEDTSFGGNLGRAVFQAKKRLLEPLGLVEEAAKTAPGKKRPVDQSPQEPDSSSGVGKSGKQPARKRLNFGQTGDSESVPDPQPLGEPPAAPTSLGSNTMASGGGAPMADNNEGADGVGNSSGNWHCDSQWLGDRVITTSTRTWALPTYNNHLYKQISSQSGASNDNHYFGYSTPWGYFDFNRFHCHFSPRDWQRLINNNWGFRPKKLSFKLFNIQVKEVTQNDGTTTIANNLTSTVQVFGDSEYQLPYVLGSAHQGCLPPFPADVFMVPQYGYLTLNNGSQAVGRSSFYCLEYFPSQMLRTGNNFQFSYTFEDVPFHSSYAHSQSLDRLMNPLIDQYLYYLNRTQGTTSGTTNQSRLLFSQAGPQSMSLQARNWLPGPCYRQQRLSKTANDNNNSNIPWTAASKYHLNGRDSLVNPGPAMASHKDDEEKFFPMHGNLIFGKEGTTASNAELDNVMITDEEEIRTTNPVATEQYGTVANNLQSSNTAPTTRTVNDQGALPGMVWQDRDVYLQGPIWAKIPHTDGHFHPSPLMGGFGLKHPPPQIMIKNTPVPANPPTTFSPAKFASFITQYSTGQVSVEIEWELQKENSKRWNPEIQYTSNLNKSVNVDFTVDTNGVYSEPRPIGTRYLTRPL

SEQ ID NO: 915 - protein, 736 aa, synthetic construct
MAADGYLPDWLEDNLSEGIREWWALQPGAPKPKANQQHQDNARGLVLPGYKYLGPGNGLDKGEPVNAADAAALEHDKAYDQQLKAGDNPYLKYNHADAEFQERLKEDTSFGGNLGRAVFQAKKRLLEPLGLVEEAAKTAPGKKRPVDQSPQEPDSSSGVGKSGKQPARKRLNFGQTGDSESVPDPQPLGEPPAAPTSLGSNTMASGGGAPMADNNEGADGVGNSSGNWHCDSQWLGDRVITTSTRTWALPTYNNHLYKQISSQSGASNDNHYFGYSTPWGYFDFNRFHCHFSPRDWQRLINNNWGFRPKKLSFKLFNIQVKEVTQNDGTTTIANNLTSTVQVFGDSEYQLPYVLGSAHQGCLPPFPADVFMVPQYGYLTLNNGSQAVGRSSFYCLEYFPSQMLRTGNNFQFSYTFEDVPFHSSYAHSQSLDRLMNPLIDQYLYYLNRTQGTTSGTTNQSRLLFSQAGPQSMSLQARNWLPGPCYRQQRLSKTANDNNNSNFPWTRASKYHLNGRDSLVNPGPAMASHKDDEEKFFPMHGNLIFGKEGTTASNAELDNVMITDEEEIRTTNPVATEQYGTVANNLQSSNTAPTTRTVNDQGALPGMVWQDRDVYLQGPIWAKIPHTDGHFHPSPLMGGFGLKHPPPQIMIKNTPVPANPPTTFSPAKFASFITQYSTGQVSVEIEWELQKENSKRWNPEIQYTSNLNKSVNVDFTVDTNGVYSEPRPIGTRYLTRPL

SEQ ID NO: 916 - protein, 736 aa, synthetic construct
MAADGYLPDWLEDNLSEGIREWWALQPGAPKPKANQQHQDNARGLVLPGYKYLGPGNGLDKGEPVNAADAAALEHDKAYDQQLKAGDNPYLKYNHADAEFQERLKEDTSFGGNLGRAVFQAKKRLLEPLGLVEEAAKTAPGKKRPVDQSPQEPDSSSGVGKSGKQPARKRLNFGQTGDSESVPDPQPLGEPPAAPTSLGSNTMASGGGAPMADNNEGADGVGNSSGNWHCDSQWLGDRVITTSTRTWALPTYNNHLYKQISSQSGASNDNHYFGYSTPWGYFDFNRFHCHFSPRDWQRLINNNWGFRPKKLSFKLFNIQVKEVTQNDGTTTIANNLTSTVQVFGDSEYQLPYVLGSAHQGCLPPFPADVFMVPQYGYLTLNNGSQAVGRSSFYCLEYFPSQMLRTGNNFQFSYTFEDVPFHSSYAHSQSLDRLMNPLIDQYLYYLNRTQGTTSGTTNQSRLLFSQAGPQSMSLQARNWLPGPCYRQQRLSKTANDNNNSNFPWTAASKYHLNGRDSLVNPGPAMASHKDDEEKFFPMHGNLIFGKEGTTASNAELDNVMITDEEEIRTTNPVATEQYGTVANNLQSSNTAPTTRTVNDQGALPGMVWQDRDVYLQGPIWAKIPHTDGHFHPSPLMGGFGLKHPPPQIMIKNTPVPANPPTTFSPAKFASFITQYSTGQVSVEIEWELQKENSKRWNPEIQYTSNLCKSVNVDFTVDTNGVYSEPRPIGTRYLTRPL

SEQ ID NO: 917 - protein, 736 aa, synthetic construct
MAADGYLPDWLEDNLSEGIREWWALQPGAPKPKANQQHQDNARGLVLPGYKYLGPGNGLDKGEPVNAADAAALEHDKAYDQQLKAGDNPYLKYNHADAEFQERLKEDTSFGGNLGRAVFQAKKRLLEPLGLVEEAAKTAPGKKRPVDQSPQEPDSSSGVGKSGKQPARKRLNFGQTGDSESVPDPQPLGEPPAAPTSLGSNTMASGGGAPMADNNEGADGVGNSSGNWHCDSQWLGDRVITTSTRTWALPTYNNHLYKQISSQSGASNDNHYFGYSTPWGYFDFNRFHCHFSPRDWQRLINNNWGFRPKKLSFKLFNIQVKEVTQNDGTTTIANNLTSTVQVFGDSEYQLPYVLGSAHQGCLPPFPADVFMVPQYGYLTLNNGSQAVGRSSFYCLEYFPSQMLRTGNNFQFSYTFEDVPFHSSYAHSQSLDRLMNPLIDQYLYYLNRTQGTTSGTTNQSRLLFSQAGPQSMSLQARNWLPGPCYRQQRLSKTANDNNNSNIPWTRASKYHLNGRDSLVNPGPAMASHKDDEEKFFPMHGNLIFGKEGTTASNAELDNVMITDEEEIRTTNPVATEQYGTVANNLQSSNTAPTTRTVNDQGALPGMVWQDRDVYLQGPIWAKIPHTDGHFHPSPLMGGFGLKHPPPQIMIKNTPVPANPPTTFSPAKFASFITQYSTGQVSVEIEWELQKENSKRWNPEIQYTSNLNKSVNVDFTVDTNGVYSEPRPIGTRYLTRPL

SEQ ID NO: 918 - protein, 736 aa, synthetic construct
MAADGYLPDWLEDNLSEGIREWWALQPGAPKPKANQQHQDNARGLVLPGYKYLGPGNGLDKGEPVNAADAAALEHDKAYDQQLKAGDNPYLKYNHADAEFQERLKEDTSFGGNLGRAVFQAKKRLLEPLGLVEEAAKTAPGKKRPVDQSPQEPDSSSGVGKSGKQPARKRLNFGQTGDSESVPDPQPLGEPPAAPTSLGSNTMASGGGAPMADNNEGADGVGNSSGNWHCDSQWLGDRVITTSTRTWALPTYNNHLYKQISSQSGASNDNHYFGYSTPWGYFDFNRFHCHFSPRDWQRLINNNWGFRPKKLSFKLFNIQVKEVTQNDGTTTIANNLTSTVQVFGDSEYQLPYVLGSAHQGCLPPFPADVFMVPQYGYLTLNNGSQAVGRSSFYCLEYFPSQMLRTGNNFQFSYTFEDVPFHSSYAHSQSLDRLMNPLIDQYLYYLNRTQGTTSGTTNQSRLLFSQAGPQSMSLQARNWLPGPCYRQQRLSKTANDNNNSNIPWTAASKYHLNGRDSLVNPGPAMASHKDDEEKFFPMHGNLIFGKEGTTASNAELDNVMITDEEEIRTTNPVATEQYGTVANNLQSSNTAPTTRTVNDQGALPGMVWQDRDVYLQGPIWAKIPHTDGHFHPSPLMGGFGLKHPPPQIMIKNTPVPANPPTTFSPAKFASFITQYSTGQVSVEIEWELQKENSKRWNPEIQYTSNLCKSVNVDFTVDTNGVYSEPRPIGTRYLTRPL

SEQ ID NO: 919 - protein, 736 aa, synthetic construct
MAADGYLPDWLEDNLSEGIREWWALQPGAPKPKANQQHQDNARGLVLPGYKYLGPGNGLDKGEPVNAADAAALEHDKAYDQQLKAGDNPYLKYNHADAEFQERLKEDTSFGGNLGRAVFQAKKRLLEPLGLVEEAAKTAPGKKRPVDQSPQEPDSSSGVGKSGKQPARKRLNFGQTGDSESVPDPQPLGEPPAAPTSLGSNTMASGGGAPMADNNEGADGVGNSSGNWHCDSQWLGDRVITTSTRTWALPTYNNHLYKQISSQSGASNDNHYFGYSTPWGYFDFNRFHCHFSPRDWQRLINNNWGFRPKKLSFKLFNIQVKEVTQNDGTTTIANNLTSTVQVFGDSEYQLPYVLGSAHQGCLPPFPADVFMVPQYGYLTLNNGSQAVGRSSFYCLEYFPSQMLRTGNNFQFSYTFEDVPFHSSYAHSQSLDRLMNPLIDQYLYYLNRTQGTTSGTTNQSRLLFSQAGPQSMSLQARNWLPGPCYRQQRLSKTANDNNNSNFPWTRASKYHLNGRDSLVNPGPAMASHKDDEEKFFPMHGNLIFGKEGTTASNAELDNVMITDEEEIRTTNPVATEQYGTVANNLQSSNTAPTTRTVNDQGALPGMVWQDRDVYLQGPIWAKIPHTDGHFHPSPLMGGFGLKHPPPQIMIKNTPVPANPPTTFSPAKFASFITQYSTGQVSVEIEWELQKENSKRWNPEIQYTSNLCKSVNVDFTVDTNGVYSEPRPIGTRYLTRPL

SEQ ID NO: 920 - protein, 736 aa, synthetic construct
MAADGYLPDWLEDNLSEGIREWWALQPGAPKPKANQQHQDNARGLVLPGYKYLGPGNGLDKGEPVNAADAAALEHDKAYDQQLKAGDNPYLKYNHADAEFQERLKEDTSFGGNLGRAVFQAKKRLLEPLGLVEEAAKTAPGKKRPVDQSPQEPDSSSGVGKSGKQPARKRLNFGQTGDSESVPDPQPLGEPPAAPTSLGSNTMASGGGAPMADNNEGADGVGNSSGNWHCDSQWLGDRVITTSTRTWALPTYNNHLYKQISSQSGASNDNHYFGYSTPWGYFDFNRFHCHFSPRDWQRLINNNWGFRPKKLSFKLFNIQVKEVTQNDGTTTIANNLTSTVQVFGDSEYQLPYVLGSAHQGCLPPFPADVFMVPQYGYLTLNNGSQAVGRSSFYCLEYFPSQMLRTGNNFQFSYTFEDVPFHSSYAHSQSLDRLMNPLIDQYLYYLNRTQGTTSGTTNQSRLLFSQAGPQSMSLQARNWLPGPCYRQQRLSKTANDNNNSNIPWTRASKYHLNGRDSLVNPGPAMASHKDDEEKFFPMHGNLIFGKEGTTASNAELDNVMITDEEEIRTTNPVATEQYGTVANNLQSSNTAPTTRTVNDQGALPGMVWQDRDVYLQGPIWAKIPHTDGHFHPSPLMGGFGLKHPPPQIMIKNTPVPANPPTTFSPAKFASFITQYSTGQVSVEIEWELQKENSKRWNPEIQYTSNLCKSVNVDFTVDTNGVYSEPRPIGTRYLTRPL

SEQ ID NO: 921 - protein, 736 aa, synthetic construct
MAADGYLPDWLEDNLSEGIREWWALQPGAPKPKANQQHQDNARGLVLPGYKYLGPGNGLDKGEPVNAADAAALEHDKAYDQQLKAGDNPYLKYNHADAEFQERLKEDTSFGGNLGRAVFQAKKRLLEPLGLVEEAAKTAPGKKRPVDQSPQEPDSSSGVGKSGKQPARKRLNFGQTGDSESVPDPQPLGEPPAAPTSLGSNTMASGGGAPMADNNEGADGVGNSSGNWHCDSQWLGDRVITTSTRTWALPTYNNHLYKQISSQSGASNDNHYFGYSTPWGYFDFNRFHCHFSPRDWQRLINNNWGFRPKKLSFKLFNIQVKEVTQNDGTTTIANNLTSTVQVFADSEYQLPYVLGSAHQGCLPPFPADVFMVPQYGYLTLNNGSQAVGRSSFYCLEYFPSQMLRTGNNFQFSYTFEDVPFHSSYAHSQSLDRLMNPLIDQYLYYLNRTQGTTSGTTNQSRLLFSQAGPQSMSLQARNWLPGPCYRQQRLSKTANDNNNSNFPWTAASKYHLNGRDSLVNPGPAMASHKDDEEKFFPMHGNLIFGKEGTTASNAELDNVMITDEEEIRTTNPVATEQYGTVANNLQSSNTAPTTRTVNDQGALPGMVWQDRDVYLQGPIWAKIPHTDGHFHPSPLMGGFGLKHPPPQIMIKNTPVPANPPTTFSPAKFASFITQYSTGQVSVEIEWELQKENSKRWNPEIQYTSNLNKSVNVDFTVDTNGVYSEPRPIGTRYLTRPL

SEQ ID NO: 922 - protein, 736 aa, synthetic construct
MAADGYLPDWLEDNLSEGIREWWALQPGAPKPKANQQHQDNARGLVLPGYKYLGPGNGLDKGEPVNAADAAALEHDKAYDQQLKAGDNPYLKYNHADAEFQERLKEDTSFGGNLGRAVFQAKKRLLEPLGLVEEAAKTAPGKKRPVDQSPQEPDSSSGVGKSGKQPARKRLNFGQTGDSESVPDPQPLGEPPAAPTSLGSNTMASGGGAPMADNNEGADGVGNSSGNWHCDSQWLGDRVITTSTRTWALPTYNNHLYKQISSQSGASNDNHYFGYSTPWGYFDFNRFHCHFSPRDWQRLINNNWGFRPKKLSFKLFNIQVKEVTQNDGTTTIANNLTSTVQVFADSEYQLPYVLGSAHQGCLPPFPADVFMVPQYGYLTLNNGSQAVGRSSFYCLEYFPSQMLRTGNNFQFSYTFEDVPFHSSYAHSQSLDRLMNPLIDQYLYYLNRTQGTTSGTTNQSRLLFSQAGPQSMSLQARNWLPGPCYRQQRLSKTANDNNNSNIPWTAASKYHLNGRDSLVNPGPAMASHKDDEEKFFPMHGNLIFGKEGTTASNAELDNVMITDEEEIRTTNPVATEQYGTVANNLQSSNTAPTTRTVNDQGALPGMVWQDRDVYLQGPIWAKIPHTDGHFHPSPLMGGFGLKHPPPQIMIKNTPVPANPPTTFSPAKFASFITQYSTGQVSVEIEWELQKENSKRWNPEIQYTSNLNKSVNVDFTVDTNGVYSEPRPIGTRYLTRPL

SEQ ID NO: 923 - protein, 736 aa, synthetic construct
MAADGYLPDWLEDNLSEGIREWWALQPGAPKPKANQQHQDNARGLVLPGYKYLGPGNGLDKGEPVNAADAAALEHDKAYDQQLKAGDNPYLKYNHADAEFQERLKEDTSFGGNLGRAVFQAKKRLLEPLGLVEEAAKTAPGKKRPVDQSPQEPDSSSGVGKSGKQPARKRLNFGQTGDSESVPDPQPLGEPPAAPTSLGSNTMASGGGAPMADNNEGADGVGNSSGNWHCDSQWLGDRVITTSTRTWALPTYNNHLYKQISSQSGASNDNHYFGYSTPWGYFDFNRFHCHFSPRDWQRLINNNWGFRPKKLSFKLFNIQVKEVTQNDGTTTIANNLTSTVQVFADSEYQLPYVLGSAHQGCLPPFPADVFMVPQYGYLTLNNGSQAVGRSSFYCLEYFPSQMLRTGNNFQFSYTFEDVPFHSSYAHSQSLDRLMNPLIDQYLYYLNRTQGTTSGTTNQSRLLFSQAGPQSMSLQARNWLPGPCYRQQRLSKTANDNNNSNFPWTRASKYHLNGRDSLVNPGPAMASHKDDEEKFFPMHGNLIFGKEGTTASNAELDNVMITDEEEIRTTNPVATEQYGTVANNLQSSNTAPTTRTVNDQGALPGMVWQDRDVYLQGPIWAKIPHTDGHFHPSPLMGGFGLKHPPPQIMIKNTPVPANPPTTFSPAKFASFITQYSTGQVSVEIEWELQKENSKRWNPEIQYTSNLNKSVNVDFTVDTNGVYSEPRPIGTRYLTRPL

SEQ ID NO: 924 - protein, 736 aa, synthetic construct
MAADGYLPDWLEDNLSEGIREWWALQPGAPKPKANQQHQDNARGLVLPGYKYLGPGNGLDKGEPVNAADAAALEHDKAYDQQLKAGDNPYLKYNHADAEFQERLKEDTSFGGNLGRAVFQAKKRLLEPLGLVEEAAKTAPGKKRPVDQSPQEPDSSSGVGKSGKQPARKRLNFGQTGDSESVPDPQPLGEPPAAPTSLGSNTMASGGGAPMADNNEGADGVGNSSGNWHCDSQWLGDRVITTSTRTWALPTYNNHLYKQISSQSGASNDNHYFGYSTPWGYFDFNRFHCHFSPRDWQRLINNNWGFRPKKLSFKLFNIQVKEVTQNDGTTTIANNLTSTVQVFADSEYQLPYVLGSAHQGCLPPFPADVFMVPQYGYLTLNNGSQAVGRSSFYCLEYFPSQMLRTGNNFQFSYTFEDVPFHSSYAHSQSLDRLMNPLIDQYLYYLNRTQGTTSGTTNQSRLLFSQAGPQSMSLQARNWLPGPCYRQQRLSKTANDNNNSNFPWTAASKYHLNGRDSLVNPGPAMASHKDDEEKFFPMHGNLIFGKEGTTASNAELDNVMITDEEEIRTTNPVATEQYGTVANNLQSSNTAPTTRTVNDQGALPGMVWQDRDVYLQGPIWAKIPHTDGHFHPSPLMGGFGLKHPPPQIMIKNTPVPANPPTTFSPAKFASFITQYSTGQVSVEIEWELQKENSKRWNPEIQYTSNLCKSVNVDFTVDTNGVYSEPRPIGTRYLTRPL

SEQ ID NO: 925 - protein, 736 aa, synthetic construct
MAADGYLPDWLEDNLSEGIREWWALQPGAPKPKANQQHQDNARGLVLPGYKYLGPGNGLDKGEPVNAADAAALEHDKAYDQQLKAGDNPYLKYNHADAEFQERLKEDTSFGGNLGRAVFQAKKRLLEPLGLVEEAAKTAPGKKRPVDQSPQEPDSSSGVGKSGKQPARKRLNFGQTGDSESVPDPQPLGEPPAAPTSLGSNTMASGGGAPMADNNEGADGVGNSSGNWHCDSQWLGDRVITTSTRTWALPTYNNHLYKQISSQSGASNDNHYFGYSTPWGYFDFNRFHCHFSPRDWQRLINNNWGFRPKKLSFKLFNIQVKEVTQNDGTTTIANNLTSTVQVFADSEYQLPYVLGSAHQGCLPPFPADVFMVPQYGYLTLNNGSQAVGRSSFYCLEYFPSQMLRTGNNFQFSYTFEDVPFHSSYAHSQSLDRLMNPLIDQYLYYLNRTQGTTSGTTNQSRLLFSQAGPQSMSLQARNWLPGPCYRQQRLSKTANDNNNSNIPWTRASKYHLNGRDSLVNPGPAMASHKDDEEKFFPMHGNLIFGKEGTTASNAELDNVMITDEEEIRTTNPVATEQYGTVANNLQSSNTAPTTRTVNDQGALPGMVWQDRDVYLQGPIWAKIPHTDGHFHPSPLMGGFGLKHPPPQIMIKNTPVPANPPTTFSPAKFASFITQYSTGQVSVEIEWELQKENSKRWNPEIQYTSNLNKSVNVDFTVDTNGVYSEPRPIGTRYLTRPL

SEQ ID NO: 926 - protein, 736 aa, synthetic construct
MAADGYLPDWLEDNLSEGIREWWALQPGAPKPKANQQHQDNARGLVLPGYKYLGPGNGLDKGEPVNAADAAALEHDKAYDQQLKAGDNPYLKYNHADAEFQERLKEDTSFGGNLGRAVFQAKKRLLEPLGLVEEAAKTAPGKKRPVDQSPQEPDSSSGVGKSGKQPARKRLNFGQTGDSESVPDPQPLGEPPAAPTSLGSNTMASGGGAPMADNNEGADGVGNSSGNWHCDSQWLGDRVITTSTRTWALPTYNNHLYKQISSQSGASNDNHYFGYSTPWGYFDFNRFHCHFSPRDWQRLINNNWGFRPKKLSFKLFNIQVKEVTQNDGTTTIANNLTSTVQVFADSEYQLPYVLGSAHQGCLPPFPADVFMVPQYGYLTLNNGSQAVGRSSFYCLEYFPSQMLRTGNNFQFSYTFEDVPFHSSYAHSQSLDRLMNPLIDQYLYYLNRTQGTTSGTTNQSRLLFSQAGPQSMSLQARNWLPGPCYRQQRLSKTANDNNNSNIPWTAASKYHLNGRDSLVNPGPAMASHKDDEEKFFPMHGNLIFGKEGTTASNAELDNVMITDEEEIRTTNPVATEQYGTVANNLQSSNTAPTTRTVNDQGALPGMVWQDRDVYLQGPIWAKIPHTDGHFHPSPLMGGFGLKHPPPQIMIKNTPVPANPPTTFSPAKFASFITQYSTGQVSVEIEWELQKENSKRWNPEIQYTSNLCKSVNVDFTVDTNGVYSEPRPIGTRYLTRPL

SEQ ID NO: 927 - protein, 736 aa, synthetic construct
MAADGYLPDWLEDNLSEGIREWWALQPGAPKPKANQQHQDNARGLVLPGYKYLGPGNGLDKGEPVNAADAAALEHDKAYDQQLKAGDNPYLKYNHADAEFQERLKEDTSFGGNLGRAVFQAKKRLLEPLGLVEEAAKTAPGKKRPVDQSPQEPDSSSGVGKSGKQPARKRLNFGQTGDSESVPDPQPLGEPPAAPTSLGSNTMASGGGAPMADNNEGADGVGNSSGNWHCDSQWLGDRVITTSTRTWALPTYNNHLYKQISSQSGASNDNHYFGYSTPWGYFDFNRFHCHFSPRDWQRLINNNWGFRPKKLSFKLFNIQVKEVTQNDGTTTIANNLTSTVQVFADSEYQLPYVLGSAHQGCLPPFPADVFMVPQYGYLTLNNGSQAVGRSSFYCLEYFPSQMLRTGNNFQFSYTFEDVPFHSSYAHSQSLDRLMNPLIDQYLYYLNRTQGTTSGTTNQSRLLFSQAGPQSMSLQARNWLPGPCYRQQRLSKTANDNNNSNFPWTRASKYHLNGRDSLVNPGPAMASHKDDEEKFFPMHGNLIFGKEGTTASNAELDNVMITDEEEIRTTNPVATEQYGTVANNLQSSNTAPTTRTVNDQGALPGMVWQDRDVYLQGPIWAKIPHTDGHFHPSPLMGGFGLKHPPPQIMIKNTPVPANPPTTFSPAKFASFITQYSTGQVSVEIEWELQKENSKRWNPEIQYTSNLCKSVNVDFTVDTNGVYSEPRPIGTRYLTRPL

SEQ ID NO: 928 - protein, 736 aa, synthetic construct
MAADGYLPDWLEDNLSEGIREWWALQPGAPKPKANQQHQDNARGLVLPGYKYLGPGNGLDKGEPVNAADAAALEHDKAYDQQLKAGDNPYLKYNHADAEFQERLKEDTSFGGNLGRAVFQAKKRLLEPLGLVEEAAKTAPGKKRPVDQSPQEPDSSSGVGKSGKQPARKRLNFGQTGDSESVPDPQPLGEPPAAPTSLGSNTMASGGGAPMADNNEGADGVGNSSGNWHCDSQWLGDRVITTSTRTWALPTYNNHLYKQISSQSGASNDNHYFGYSTPWGYFDFNRFHCHFSPRDWQRLINNNWGFRPKKLSFKLFNIQVKEVTQNDGTTTIANNLTSTVQVFADSEYQLPYVLGSAHQGCLPPFPADVFMVPQYGYLTLNNGSQAVGRSSFYCLEYFPSQMLRTGNNFQFSYTFEDVPFHSSYAHSQSLDRLMNPLIDQYLYYLNRTQGTTSGTTNQSRLLFSQAGPQSMSLQARNWLPGPCYRQQRLSKTANDNNNSNIPWTRASKYHLNGRDSLVNPGPAMASHKDDEEKFFPMHGNLIFGKEGTTASNAELDNVMITDEEEIRTTNPVATEQYGTVANNLQSSNTAPTTRTVNDQGALPGMVWQDRDVYLQGPIWAKIPHTDGHFHPSPLMGGFGLKHPPPQIMIKNTPVPANPPTTFSPAKFASFITQYSTGQVSVEIEWELQKENSKRWNPEIQYTSNLCKSVNVDFTVDTNGVYSEPRPIGTRYLTRPL

SEQ ID NO: 929 - protein, 736 aa, synthetic construct
MTADGYLPDWLEDNLSEGIREWWALKPGAPQPKANQQHQDNARGLVLPGYKYLGPGNGLDKGEPVNAADAAALEHDKAYDQQLKAGDNPYLKYNHADAEFQERLKEDTSFGGNLGRAVFQAKKRLLEPLGLVEEAAKTAPGKKRPVEQSPQEPDSSAGIGKSGAQPAKKRLNFGQTGDTESVPDPQPIGEPPAAPSGVGSLTMASGGGAPVADNNEGADGVGSSSGNWHCDSQWLGDRVITTSTRTWALPTYNNHLYKQISNSTSGGSSNDNAYFGYSTPWGYFDFNRFHCHFSPRDWQRLINNNWGFRPKQLNFKLFNIQVKEVTDNNGVKTIANNLTSTVQVFGDSDYQLPYVLGSAHEGCLPPFPADVFMIPQYGYLTLNDGSQAVGRSSFYCLEYFPSQMLRTGNNFQFSYEFENVPFHSSYAHSQSLDRLMNPLIDQYLYYLSKTINGSGQNQQTLKFSVAGPSNMAVQGRNYIPGPSYRQQRVSTTVTQNNNSEFAWPGASSWALNGRNSLMNPGPAMASHKEGEDRFFPLSGSLIFGKQGTGRDNVDADKVMITNEEEIKTTNPVATESYGQVATNHQSAQAQAQTGWVQNQGILPGMVWQDRDVYLQGPIWAKIPHTDGNFHPSPLMGGFGMKHPPPQILIKNTPVPADPPTAFNKDKLNSFITQYSTGQVSVEIEWELQKENSKRWNPEIQYTSNYYKSNNVEFAVNTEGVYSEPRPIGTRYLTRNL

SEQ ID NO: 930 - protein, 736 aa, synthetic construct
MTADGYLPDWLEDNLSEGIREWWALKPGAPQPKANQQHQDNARGLVLPGYKYLGPGNGLDKGEPVNAADAAALEHDKAYDQQLKAGDNPYLKYNHADAEFQERLKEDTSFGGNLGRAVFQAKKRLLEPLGLVEEAAKTAPGKKRPVEQSPQEPDSSAGIGKSGAQPAKKRLNFGQTGDTESVPDPQPIGEPPAAPSGVGSLTMASGGGAPVADNNEGADGVGSSSGNWHCDSQWLGDRVITTSTRTWALPTYNNHLYKQISNSTSGGSSNDNAYFGYSTPWGYFDFNRFHCHFSPRDWQRLINNNWGFRPKQLNFKLFNIQVKEVTDNNGVKTIANNLTSTVQVFGDSDYQLPYVLGSAHEGCLPPFPADVFMIPQYGYLTLNDGSQAVGRSSFYCLEYFPSQMLRTGNNFQFSYEFENVPFHSSYAHSQSLDRLMNPLIDQYLYYLSKTINGSGQNQQTLKFSVAGPSNMAVQGRNYIPGPSYRQQRVSTTVTQNNNSEIAWPGASSWALNGRNSLMNPGPAMASHKEGEDRFFPLSGSLIFGKQGTGRDNVDADKVMITNEEEIKTTNPVATESYGQVATNHQSAQAQAQTGWVQNQGILPGMVWQDRDVYLQGPIWAKIPHTDGNFHPSPLMGGFGMKHPPPQILIKNTPVPADPPTAFNKDKLNSFITQYSTGQVSVEIEWELQKENSKRWNPEIQYTSNYYKSNNVEFAVNTEGVYSEPRPIGTRYLTRNL

SEQ ID NO: 931 - protein, 736 aa, synthetic construct
MTADGYLPDWLEDNLSEGIREWWALKPGAPQPKANQQHQDNARGLVLPGYKYLGPGNGLDKGEPVNAADAAALEHDKAYDQQLKAGDNPYLKYNHADAEFQERLKEDTSFGGNLGRAVFQAKKRLLEPLGLVEEAAKTAPGKKRPVEQSPQEPDSSAGIGKSGAQPAKKRLNFGQTGDTESVPDPQPIGEPPAAPSGVGSLTMASGGGAPVADNNEGADGVGSSSGNWHCDSQWLGDRVITTSTRTWALPTYNNHLYKQISNSTSGGSSNDNAYFGYSTPWGYFDFNRFHCHFSPRDWQRLINNNWGFRPKQLNFKLFNIQVKEVTDNNGVKTIANNLTSTVQVFGDSDYQLPYVLGSAHEGCLPPFPADVFMIPQYGYLTLNDGSQAVGRSSFYCLEYFPSQMLRTGNNFQFSYEFENVPFHSSYAHSQSLDRLMNPLIDQYLYYLSKTINGSGQNQQTLKFSVAGPSNMAVQGRNYIPGPSYRQQRVSTTVTQNNNSEFAWPRASSWALNGRNSLMNPGPAMASHKEGEDRFFPLSGSLIFGKQGTGRDNVDADKVMITNEEEIKTTNPVATESYGQVATNHQSAQAQAQTGWVQNQGILPGMVWQDRDVYLQGPIWAKIPHTDGNFHPSPLMGGFGMKHPPPQILIKNTPVPADPPTAFNKDKLNSFITQYSTGQVSVEIEWELQKENSKRWNPEIQYTSNYYKSNNVEFAVNTEGVYSEPRPIGTRYLTRNL

SEQ ID NO: 932 - protein, 736 aa, synthetic construct
MTADGYLPDWLEDNLSEGIREWWALKPGAPQPKANQQHQDNARGLVLPGYKYLGPGNGLDKGEPVNAADAAALEHDKAYDQQLKAGDNPYLKYNHADAEFQERLKEDTSFGGNLGRAVFQAKKRLLEPLGLVEEAAKTAPGKKRPVEQSPQEPDSSAGIGKSGAQPAKKRLNFGQTGDTESVPDPQPIGEPPAAPSGVGSLTMASGGGAPVADNNEGADGVGSSSGNWHCDSQWLGDRVITTSTRTWALPTYNNHLYKQISNSTSGGSSNDNAYFGYSTPWGYFDFNRFHCHFSPRDWQRLINNNWGFRPKQLNFKLFNIQVKEVTDNNGVKTIANNLTSTVQVFGDSDYQLPYVLGSAHEGCLPPFPADVFMIPQYGYLTLNDGSQAVGRSSFYCLEYFPSQMLRTGNNFQFSYEFENVPFHSSYAHSQSLDRLMNPLIDQYLYYLSKTINGSGQNQQTLKFSVAGPSNMAVQGRNYIPGPSYRQQRVSTTVTQNNNSEFAWPGASSWALNGRNSLMNPGPAMASHKEGEDRFFPLSGSLIFGKQGTGRDNVDADKVMITNEEEIKTTNPVATESYGQVATNHQSAQAQAQTGWVQNQGILPGMVWQDRDVYLQGPIWAKIPHTDGNFHPSPLMGGFGMKHPPPQILIKNTPVPADPPTAFNKDKLNSFITQYSTGQVSVEIEWELQKENSKRWNPEIQYTSNYCKSNNVEFAVNTEGVYSEPRPIGTRYLTRNL

SEQ ID NO: 933 - protein, 736 aa, synthetic construct
MTADGYLPDWLEDNLSEGIREWWALKPGAPQPKANQQHQDNARGLVLPGYKYLGPGNGLDKGEPVNAADAAALEHDKAYDQQLKAGDNPYLKYNHADAEFQERLKEDTSFGGNLGRAVFQAKKRLLEPLGLVEEAAKTAPGKKRPVEQSPQEPDSSAGIGKSGAQPAKKRLNFGQTGDTESVPDPQPIGEPPAAPSGVGSLTMASGGGAPVADNNEGADGVGSSSGNWHCDSQWLGDRVITTSTRTWALPTYNNHLYKQISNSTSGGSSNDNAYFGYSTPWGYFDFNRFHCHFSPRDWQRLINNNWGFRPKQLNFKLFNIQVKEVTDNNGVKTIANNLTSTVQVFGDSDYQLPYVLGSAHEGCLPPFPADVFMIPQYGYLTLNDGSQAVGRSSFYCLEYFPSQMLRTGNNFQFSYEFENVPFHSSYAHSQSLDRLMNPLIDQYLYYLSKTINGSGQNQQTLKFSVAGPSNMAVQGRNYIPGPSYRQQRVSTTVTQNNNSEIAWPRASSWALNGRNSLMNPGPAMASHKEGEDRFFPLSGSLIFGKQGTGRDNVDADKVMITNEEEIKTTNPVATESYGQVATNHQSAQAQAQTGWVQNQGILPGMVWQDRDVYLQGPIWAKIPHTDGNFHPSPLMGGFGMKHPPPQILIKNTPVPADPPTAFNKDKLNSFITQYSTGQVSVEIEWELQKENSKRWNPEIQYTSNYYKSNNVEFAVNTEGVYSEPRPIGTRYLTRNL

SEQ ID NO: 934 - protein, 736 aa, synthetic construct
MTADGYLPDWLEDNLSEGIREWWALKPGAPQPKANQQHQDNARGLVLPGYKYLGPGNGLDKGEPVNAADAAALEHDKAYDQQLKAGDNPYLKYNHADAEFQERLKEDTSFGGNLGRAVFQAKKRLLEPLGLVEEAAKTAPGKKRPVEQSPQEPDSSAGIGKSGAQPAKKRLNFGQTGDTESVPDPQPIGEPPAAPSGVGSLTMASGGGAPVADNNEGADGVGSSSGNWHCDSQWLGDRVITTSTRTWALPTYNNHLYKQISNSTSGGSSNDNAYFGYSTPWGYFDFNRFHCHFSPRDWQRLINNNWGFRPKQLNFKLFNIQVKEVTDNNGVKTIANNLTSTVQVFGDSDYQLPYVLGSAHEGCLPPFPADVFMIPQYGYLTLNDGSQAVGRSSFYCLEYFPSQMLRTGNNFQFSYEFENVPFHSSYAHSQSLDRLMNPLIDQYLYYLSKTINGSGQNQQTLKFSVAGPSNMAVQGRNYIPGPSYRQQRVSTTVTQNNNSEIAWPGASSWALNGRNSLMNPGPAMASHKEGEDRFFPLSGSLIFGKQGTGRDNVDADKVMITNEEEIKTTNPVATESYGQVATNHQSAQAQAQTGWVQNQGILPGMVWQDRDVYLQGPIWAKIPHTDGNFHPSPLMGGFGMKHPPPQILIKNTPVPADPPTAFNKDKLNSFITQYSTGQVSVEIEWELQKENSKRWNPEIQYTSNYCKSNNVEFAVNTEGVYSEPRPIGTRYLTRNL

SEQ ID NO: 935 - protein, 736 aa, synthetic construct
MTADGYLPDWLEDNLSEGIREWWALKPGAPQPKANQQHQDNARGLVLPGYKYLGPGNGLDKGEPVNAADAAALEHDKAYDQQLKAGDNPYLKYNHADAEFQERLKEDTSFGGNLGRAVFQAKKRLLEPLGLVEEAAKTAPGKKRPVEQSPQEPDSSAGIGKSGAQPAKKRLNFGQTGDTESVPDPQPIGEPPAAPSGVGSLTMASGGGAPVADNNEGADGVGSSSGNWHCDSQWLGDRVITTSTRTWALPTYNNHLYKQISNSTSGGSSNDNAYFGYSTPWGYFDFNRFHCHFSPRDWQRLINNNWGFRPKQLNFKLFNIQVKEVTDNNGVKTIANNLTSTVQVFGDSDYQLPYVLGSAHEGCLPPFPADVFMIPQYGYLTLNDGSQAVGRSSFYCLEYFPSQMLRTGNNFQFSYEFENVPFHSSYAHSQSLDRLMNPLIDQYLYYLSKTINGSGQNQQTLKFSVAGPSNMAVQGRNYIPGPSYRQQRVSTTVTQNNNSEFAWPRASSWALNGRNSLMNPGPAMASHKEGEDRFFPLSGSLIFGKQGTGRDNVDADKVMITNEEEIKTTNPVATESYGQVATNHQSAQAQAQTGWVQNQGILPGMVWQDRDVYLQGPIWAKIPHTDGNFHPSPLMGGFGMKHPPPQILIKNTPVPADPPTAFNKDKLNSFITQYSTGQVSVEIEWELQKENSKRWNPEIQYTSNYCKSNNVEFAVNTEGVYSEPRPIGTRYLTRNL

SEQ ID NO: 936 - protein, 736 aa, synthetic construct
MTADGYLPDWLEDNLSEGIREWWALKPGAPQPKANQQHQDNARGLVLPGYKYLGPGNGLDKGEPVNAADAAALEHDKAYDQQLKAGDNPYLKYNHADAEFQERLKEDTSFGGNLGRAVFQAKKRLLEPLGLVEEAAKTAPGKKRPVEQSPQEPDSSAGIGKSGAQPAKKRLNFGQTGDTESVPDPQPIGEPPAAPSGVGSLTMASGGGAPVADNNEGADGVGSSSGNWHCDSQWLGDRVITTSTRTWALPTYNNHLYKQISNSTSGGSSNDNAYFGYSTPWGYFDFNRFHCHFSPRDWQRLINNNWGFRPKQLNFKLFNIQVKEVTDNNGVKTIANNLTSTVQVFGDSDYQLPYVLGSAHEGCLPPFPADVFMIPQYGYLTLNDGSQAVGRSSFYCLEYFPSQMLRTGNNFQFSYEFENVPFHSSYAHSQSLDRLMNPLIDQYLYYLSKTINGSGQNQQTLKFSVAGPSNMAVQGRNYIPGPSYRQQRVSTTVTQNNNSEIAWPRASSWALNGRNSLMNPGPAMASHKEGEDRFFPLSGSLIFGKQGTGRDNVDADKVMITNEEEIKTTNPVATESYGQVATNHQSAQAQAQTGWVQNQGILPGMVWQDRDVYLQGPIWAKIPHTDGNFHPSPLMGGFGMKHPPPQILIKNTPVPADPPTAFNKDKLNSFITQYSTGQVSVEIEWELQKENSKRWNPEIQYTSNYCKSNNVEFAVNTEGVYSEPRPIGTRYLTRNL

SEQ ID NO: 937 - protein, 736 aa, synthetic construct
MTADGYLPDWLEDNLSEGIREWWALKPGAPQPKANQQHQDNARGLVLPGYKYLGPGNGLDKGEPVNAADAAALEHDKAYDQQLKAGDNPYLKYNHADAEFQERLKEDTSFGGNLGRAVFQAKKRLLEPLGLVEEAAKTAPGKKRPVEQSPQEPDSSAGIGKSGAQPAKKRLNFGQTGDTESVPDPQPIGEPPAAPSGVGSLTMASGGGAPVADNNEGADGVGSSSGNWHCDSQWLGDRVITTSTRTWALPTYNNHLYKQISNSTSGGSSNDNAYFGYSTPWGYFDFNRFHCHFSPRDWQRLINNNWGFRPKQLNFKLFNIQVKEVTDNNGVKTIANNLTSTVQVFTDSDYQLPYVLGSAHEGCLPPFPADVFMIPQYGYLTLNDGSQAVGRSSFYCLEYFPSQMLRTGNNFQFSYEFENVPFHSSYAHSQSLDRLMNPLIDQYLYYLSKTINGSGQNQQTLKFSVAGPSNMAVQGRNYIPGPSYRQQRVSTTVTQNNNSEFAWPGASSWALNGRNSLMNPGPAMASHKEGEDRFFPLSGSLIFGKQGTGRDNVDADKVMITNEEEIKTTNPVATESYGQVATNHQSAQAQAQTGWVQNQGILPGMVWQDRDVYLQGPIWAKIPHTDGNFHPSPLMGGFGMKHPPPQILIKNTPVPADPPTAFNKDKLNSFITQYSTGQVSVEIEWELQKENSKRWNPEIQYTSNLYKSNNVEFAVNTEGVYSEPRPIGTRYLTRNL

SEQ ID NO: 938 - protein, 736 aa, synthetic construct
MTADGYLPDWLEDNLSEGIREWWALKPGAPQPKANQQHQDNARGLVLPGYKYLGPGNGLDKGEPVNAADAAALEHDKAYDQQLKAGDNPYLKYNHADAEFQERLKEDTSFGGNLGRAVFQAKKRLLEPLGLVEEAAKTAPGKKRPVEQSPQEPDSSAGIGKSGAQPAKKRLNFGQTGDTESVPDPQPIGEPPAAPSGVGSLTMASGGGAPVADNNEGADGVGSSSGNWHCDSQWLGDRVITTSTRTWALPTYNNHLYKQISNSTSGGSSNDNAYFGYSTPWGYFDFNRFHCHFSPRDWQRLINNNWGFRPKQLNFKLFNIQVKEVTDNNGVKTIANNLTSTVQVFTDSDYQLPYVLGSAHEGCLPPFPADVFMIPQYGYLTLNDGSQAVGRSSFYCLEYFPSQMLRTGNNFQFSYEFENVPFHSSYAHSQSLDRLMNPLIDQYLYYLSKTINGSGQNQQTLKFSVAGPSNMAVQGRNYIPGPSYRQQRVSTTVTQNNNSEIAWPGASSWALNGRNSLMNPGPAMASHKEGEDRFFPLSGSLIFGKQGTGRDNVDADKVMITNEEEIKTTNPVATESYGQVATNHQSAQAQAQTGWVQNQGILPGMVWQDRDVYLQGPIWAKIPHTDGNFHPSPLMGGFGMKHPPPQILIKNTPVPADPPTAFNKDKLNSFITQYSTGQVSVEIEWELQKENSKRWNPEIQYTSNLYKSNNVEFAVNTEGVYSEPRPIGTRYLTRNL

SEQ ID NO: 939 - protein, 736 aa, synthetic construct
MTADGYLPDWLEDNLSEGIREWWALKPGAPQPKANQQHQDNARGLVLPGYKYLGPGNGLDKGEPVNAADAAALEHDKAYDQQLKAGDNPYLKYNHADAEFQERLKEDTSFGGNLGRAVFQAKKRLLEPLGLVEEAAKTAPGKKRPVEQSPQEPDSSAGIGKSGAQPAKKRLNFGQTGDTESVPDPQPIGEPPAAPSGVGSLTMASGGGAPVADNNEGADGVGSSSGNWHCDSQWLGDRVITTSTRTWALPTYNNHLYKQISNSTSGGSSNDNAYFGYSTPWGYFDFNRFHCHFSPRDWQRLINNNWGFRPKQLNFKLFNIQVKEVTDNNGVKTIANNLTSTVQVFTDSDYQLPYVLGSAHEGCLPPFPADVFMIPQYGYLTLNDGSQAVGRSSFYCLEYFPSQMLRTGNNFQFSYEFENVPFHSSYAHSQSLDRLMNPLIDQYLYYLSKTINGSGQNQQTLKFSVAGPSNMAVQGRNYIPGPSYRQQRVSTTVTQNNNSEFAWPRASSWALNGRNSLMNPGPAMASHKEGEDRFFPLSGSLIFGKQGTGRDNVDADKVMITNEEEIKTTNPVATESYGQVATNHQSAQAQAQTGWVQNQGILPGMVWQDRDVYLQGPIWAKIPHTDGNFHPSPLMGGFGMKHPPPQILIKNTPVPADPPTAFNKDKLNSFITQYSTGQVSVEIEWELQKENSKRWNPEIQYTSNLYKSNNVEFAVNTEGVYSEPRPIGTRYLTRNL

SEQ ID NO: 940 - protein, 736 aa, synthetic construct
MTADGYLPDWLEDNLSEGIREWWALKPGAPQPKANQQHQDNARGLVLPGYKYLGPGNGLDKGEPVNAADAAALEHDKAYDQQLKAGDNPYLKYNHADAEFQERLKEDTSFGGNLGRAVFQAKKRLLEPLGLVEEAAKTAPGKKRPVEQSPQEPDSSAGIGKSGAQPAKKRLNFGQTGDTESVPDPQPIGEPPAAPSGVGSLTMASGGGAPVADNNEGADGVGSSSGNWHCDSQWLGDRVITTSTRTWALPTYNNHLYKQISNSTSGGSSNDNAYFGYSTPWGYFDFNRFHCHFSPRDWQRLINNNWGFRPKQLNFKLFNIQVKEVTDNNGVKTIANNLTSTVQVFTDSDYQLPYVLGSAHEGCLPPFPADVFMIPQYGYLTLNDGSQAVGRSSFYCLEYFPSQMLRTGNNFQFSYEFENVPFHSSYAHSQSLDRLMNPLIDQYLYYLSKTINGSGQNQQTLKFSVAGPSNMAVQGRNYIPGPSYRQQRVSTTVTQNNNSEFAWPGASSWALNGRNSLMNPGPAMASHKEGEDRFFPLSGSLIFGKQGTGRDNVDADKVMITNEEEIKTTNPVATESYGQVATNHQSAQAQAQTGWVQNQGILPGMVWQDRDVYLQGPIWAKIPHTDGNFHPSPLMGGFGMKHPPPQILIKNTPVPADPPTAFNKDKLNSFITQYSTGQVSVEIEWELQKENSKRWNPEIQYTSNLCKSNNVEFAVNTEGVYSEPRPIGTRYLTRNL

SEQ ID NO: 941 - protein, 736 aa, synthetic construct
MTADGYLPDWLEDNLSEGIREWWALKPGAPQPKANQQHQDNARGLVLPGYKYLGPGNGLDKGEPVNAADAAALEHDKAYDQQLKAGDNPYLKYNHADAEFQERLKEDTSFGGNLGRAVFQAKKRLLEPLGLVEEAAKTAPGKKRPVEQSPQEPDSSAGIGKSGAQPAKKRLNFGQTGDTESVPDPQPIGEPPAAPSGVGSLTMASGGGAPVADNNEGADGVGSSSGNWHCDSQWLGDRVITTSTRTWALPTYNNHLYKQISNSTSGGSSNDNAYFGYSTPWGYFDFNRFHCHFSPRDWQRLINNNWGFRPKQLNFKLFNIQVKEVTDNNGVKTIANNLTSTVQVFTDSDYQLPYVLGSAHEGCLPPFPADVFMIPQYGYLTLNDGSQAVGRSSFYCLEYFPSQMLRTGNNFQFSYEFENVPFHSSYAHSQSLDRLMNPLIDQYLYYLSKTINGSGQNQQTLKFSVAGPSNMAVQGRNYIPGPSYRQQRVSTTVTQNNNSEIAWPRASSWALNGRNSLMNPGPAMASHKEGEDRFFPLSGSLIFGKQGTGRDNVDADKVMITNEEEIKTTNPVATESYGQVATNHQSAQAQAQTGWVQNQGILPGMVWQDRDVYLQGPIWAKIPHTDGNFHPSPLMGGFGMKHPPPQILIKNTPVPADPPTAFNKDKLNSFITQYSTGQVSVEIEWELQKENSKRWNPEIQYTSNLYKSNNVEFAVNTEGVYSEPRPIGTRYLTRNL

SEQ ID NO: 942 - protein, 736 aa, synthetic construct
MTADGYLPDWLEDNLSEGIREWWALKPGAPQPKANQQHQDNARGLVLPGYKYLGPGNGLDKGEPVNAADAAALEHDKAYDQQLKAGDNPYLKYNHADAEFQERLKEDTSFGGNLGRAVFQAKKRLLEPLGLVEEAAKTAPGKKRPVEQSPQEPDSSAGIGKSGAQPAKKRLNFGQTGDTESVPDPQPIGEPPAAPSGVGSLTMASGGGAPVADNNEGADGVGSSSGNWHCDSQWLGDRVITTSTRTWALPTYNNHLYKQISNSTSGGSSNDNAYFGYSTPWGYFDFNRFHCHFSPRDWQRLINNNWGFRPKQLNFKLFNIQVKEVTDNNGVKTIANNLTSTVQVFTDSDYQLPYVLGSAHEGCLPPFPADVFMIPQYGYLTLNDGSQAVGRSSFYCLEYFPSQMLRTGNNFQFSYEFENVPFHSSYAHSQSLDRLMNPLIDQYLYYLSKTINGSGQNQQTLKFSVAGPSNMAVQGRNYIPGPSYRQQRVSTTVTQNNNSEIAWPGASSWALNGRNSLMNPGPAMASHKEGEDRFFPLSGSLIFGKQGTGRDNVDADKVMITNEEEIKTTNPVATESYGQVATNHQSAQAQAQTGWVQNQGILPGMVWQDRDVYLQGPIWAKIPHTDGNFHPSPLMGGFGMKHPPPQILIKNTPVPADPPTAFNKDKLNSFITQYSTGQVSVEIEWELQKENSKRWNPEIQYTSNLCKSNNVEFAVNTEGVYSEPRPIGTRYLTRNL

SEQ ID NO: 943 - protein, 736 aa, synthetic construct
MTADGYLPDWLEDNLSEGIREWWALKPGAPQPKANQQHQDNARGLVLPGYKYLGPGNGLDKGEPVNAADAAALEHDKAYDQQLKAGDNPYLKYNHADAEFQERLKEDTSFGGNLGRAVFQAKKRLLEPLGLVEEAAKTAPGKKRPVEQSPQEPDSSAGIGKSGAQPAKKRLNFGQTGDTESVPDPQPIGEPPAAPSGVGSLTMASGGGAPVADNNEGADGVGSSSGNWHCDSQWLGDRVITTSTRTWALPTYNNHLYKQISNSTSGGSSNDNAYFGYSTPWGYFDFNRFHCHFSPRDWQRLINNNWGFRPKQLNFKLFNIQVKEVTDNNGVKTIANNLTSTVQVFTDSDYQLPYVLGSAHEGCLPPFPADVFMIPQYGYLTLNDGSQAVGRSSFYCLEYFPSQMLRTGNNFQFSYEFENVPFHSSYAHSQSLDRLMNPLIDQYLYYLSKTINGSGQNQQTLKFSVAGPSNMAVQGRNYIPGPSYRQQRVSTTVTQNNNSEFAWPRASSWALNGRNSLMNPGPAMASHKEGEDRFFPLSGSLIFGKQGTGRDNVDADKVMITNEEEIKTTNPVATESYGQVATNHQSAQAQAQTGWVQNQGILPGMVWQDRDVYLQGPIWAKIPHTDGNFHPSPLMGGFGMKHPPPQILIKNTPVPADPPTAFNKDKLNSFITQYSTGQVSVEIEWELQKENSKRWNPEIQYTSNLCKSNNVEFAVNTEGVYSEPRPIGTRYLTRNL

SEQ ID NO: 944 - protein, 736 aa, synthetic construct
MTADGYLPDWLEDNLSEGIREWWALKPGAPQPKANQQHQDNARGLVLPGYKYLGPGNGLDKGEPVNAADAAALEHDKAYDQQLKAGDNPYLKYNHADAEFQERLKEDTSFGGNLGRAVFQAKKRLLEPLGLVEEAAKTAPGKKRPVEQSPQEPDSSAGIGKSGAQPAKKRLNFGQTGDTESVPDPQPIGEPPAAPSGVGSLTMASGGGAPVADNNEGADGVGSSSGNWHCDSQWLGDRVITTSTRTWALPTYNNHLYKQISNSTSGGSSNDNAYFGYSTPWGYFDFNRFHCHFSPRDWQRLINNNWGFRPKQLNFKLFNIQVKEVTDNNGVKTIANNLTSTVQVFTDSDYQLPYVLGSAHEGCLPPFPADVFMIPQYGYLTLNDGSQAVGRSSFYCLEYFPSQMLRTGNNFQFSYEFENVPFHSSYAHSQSLDRLMNPLIDQYLYYLSKTINGSGQNQQTLKFSVAGPSNMAVQGRNYIPGPSYRQQRVSTTVTQNNNSEIAWPRASSWALNGRNSLMNPGPAMASHKEGEDRFFPLSGSLIFGKQGTGRDNVDADKVMITNEEEIKTTNPVATESYGQVATNHQSAQAQAQTGWVQNQGILPGMVWQDRDVYLQGPIWAKIPHTDGNFHPSPLMGGFGMKHPPPQILIKNTPVPADPPTAFNKDKLNSFITQYSTGQVSVEIEWELQKENSKRWNPEIQYTSNLCKSNNVEFAVNTEGVYSEPRPIGTRYLTRNL

SEQ ID NO: 945 - protein, 736 aa, synthetic construct
MTADGYLPDWLEDNLSEGIREWWALKPGAPQPKANQQHQDNARGLVLPGYKYLGPGNGLDKGEPVNAADAAALEHDKAYDQQLKAGDNPYLKYNHADAEFQERLKEDTSFGGNLGRAVFQAKKRLLEPLGLVEEAAKTAPGKKRPVEQSPQEPDSSAGIGKSGAQPAKKRLNFGQTGDTESVPDPQPIGEPPAAPSGVGSLTMASGGGAPVADNNEGADGVGSSSGNWHCDSQWLGDRVITTSTRTWALPTYNNHLYKQISNSTSGGSSNDNAYFGYSTPWGYFDFNRFHCHFSPRDWQRLINNNWGFRPKQLNFKLFNIQVKEVTDNNGVKTIANNLTSTVQVFGDSDYQLPYVLGSAHEGCLPPFPADVFMIPQYGYLTLNDGSQAVGRSSFYCLEYFPSQMLRTGNNFQFSYEFENVPFHSSYAHSQSLDRLMNPLIDQYLYYLSKTINGSGQNQQTLKFSVAGPSNMAVQGRNYIPGPSYRQQRVSTTVTQNNNSEFAWPGASSWALNGRNSLMNPGPAMASHKEGEDRFFPLSGSLIFGKQGTGRDNVDADKVMITNEEEIKTTNPVATESYGQVATNHQSAQAQAQTGWVQNQGILPGMVWQDRDVYLQGPIWAKIPHTDGNFHPSPLMGGFGMKHPPPQILIKNTPVPADPPTAFNKDKLNSFITQYSTGQVSVEIEWELQKENSKRWNPEIQYTSNLYKSNNVEFAVNTEGVYSEPRPIGTRYLTRNL

SEQ ID NO: 946 - protein, 736 aa, synthetic construct
MTADGYLPDWLEDNLSEGIREWWALKPGAPQPKANQQHQDNARGLVLPGYKYLGPGNGLDKGEPVNAADAAALEHDKAYDQQLKAGDNPYLKYNHADAEFQERLKEDTSFGGNLGRAVFQAKKRLLEPLGLVEEAAKTAPGKKRPVEQSPQEPDSSAGIGKSGAQPAKKRLNFGQTGDTESVPDPQPIGEPPAAPSGVGSLTMASGGGAPVADNNEGADGVGSSSGNWHCDSQWLGDRVITTSTRTWALPTYNNHLYKQISNSTSGGSSNDNAYFGYSTPWGYFDFNRFHCHFSPRDWQRLINNNWGFRPKQLNFKLFNIQVKEVTDNNGVKTIANNLTSTVQVFGDSDYQLPYVLGSAHEGCLPPFPADVFMIPQYGYLTLNDGSQAVGRSSFYCLEYFPSQMLRTGNNFQFSYEFENVPFHSSYAHSQSLDRLMNPLIDQYLYYLSKTINGSGQNQQTLKFSVAGPSNMAVQGRNYIPGPSYRQQRVSTTVTQNNNSEIAWPGASSWALNGRNSLMNPGPAMASHKEGEDRFFPLSGSLIFGKQGTGRDNVDADKVMITNEEEIKTTNPVATESYGQVATNHQSAQAQAQTGWVQNQGILPGMVWQDRDVYLQGPIWAKIPHTDGNFHPSPLMGGFGMKHPPPQILIKNTPVPADPPTAFNKDKLNSFITQYSTGQVSVEIEWELQKENSKRWNPEIQYTSNLYKSNNVEFAVNTEGVYSEPRPIGTRYLTRNL

SEQ ID NO: 947 - protein, 736 aa, synthetic construct
MTADGYLPDWLEDNLSEGIREWWALKPGAPQPKANQQHQDNARGLVLPGYKYLGPGNGLDKGEPVNAADAAALEHDKAYDQQLKAGDNPYLKYNHADAEFQERLKEDTSFGGNLGRAVFQAKKRLLEPLGLVEEAAKTAPGKKRPVEQSPQEPDSSAGIGKSGAQPAKKRLNFGQTGDTESVPDPQPIGEPPAAPSGVGSLTMASGGGAPVADNNEGADGVGSSSGNWHCDSQWLGDRVITTSTRTWALPTYNNHLYKQISNSTSGGSSNDNAYFGYSTPWGYFDFNRFHCHFSPRDWQRLINNNWGFRPKQLNFKLFNIQVKEVTDNNGVKTIANNLTSTVQVFGDSDYQLPYVLGSAHEGCLPPFPADVFMIPQYGYLTLNDGSQAVGRSSFYCLEYFPSQMLRTGNNFQFSYEFENVPFHSSYAHSQSLDRLMNPLIDQYLYYLSKTINGSGQNQQTLKFSVAGPSNMAVQGRNYIPGPSYRQQRVSTTVTQNNNSEFAWPRASSWALNGRNSLMNPGPAMASHKEGEDRFFPLSGSLIFGKQGTGRDNVDADKVMITNEEEIKTTNPVATESYGQVATNHQSAQAQAQTGWVQNQGILPGMVWQDRDVYLQGPIWAKIPHTDGNFHPSPLMGGFGMKHPPPQILIKNTPVPADPPTAFNKDKLNSFITQYSTGQVSVEIEWELQKENSKRWNPEIQYTSNLYKSNNVEFAVNTEGVYSEPRPIGTRYLTRNL

SEQ ID NO: 948 - protein, 736 aa, synthetic construct
MTADGYLPDWLEDNLSEGIREWWALKPGAPQPKANQQHQDNARGLVLPGYKYLGPGNGLDKGEPVNAADAAALEHDKAYDQQLKAGDNPYLKYNHADAEFQERLKEDTSFGGNLGRAVFQAKKRLLEPLGLVEEAAKTAPGKKRPVEQSPQEPDSSAGIGKSGAQPAKKRLNFGQTGDTESVPDPQPIGEPPAAPSGVGSLTMASGGGAPVADNNEGADGVGSSSGNWHCDSQWLGDRVITTSTRTWALPTYNNHLYKQISNSTSGGSSNDNAYFGYSTPWGYFDFNRFHCHFSPRDWQRLINNNWGFRPKQLNFKLFNIQVKEVTDNNGVKTIANNLTSTVQVFGDSDYQLPYVLGSAHEGCLPPFPADVFMIPQYGYLTLNDGSQAVGRSSFYCLEYFPSQMLRTGNNFQFSYEFENVPFHSSYAHSQSLDRLMNPLIDQYLYYLSKTINGSGQNQQTLKFSVAGPSNMAVQGRNYIPGPSYRQQRVSTTVTQNNNSEFAWPGASSWALNGRNSLMNPGPAMASHKEGEDRFFPLSGSLIFGKQGTGRDNVDADKVMITNEEEIKTTNPVATESYGQVATNHQSAQAQAQTGWVQNQGILPGMVWQDRDVYLQGPIWAKIPHTDGNFHPSPLMGGFGMKHPPPQILIKNTPVPADPPTAFNKDKLNSFITQYSTGQVSVEIEWELQKENSKRWNPEIQYTSNLCKSNNVEFAVNTEGVYSEPRPIGTRYLTRNL

SEQ ID NO: 949 - protein, 736 aa, synthetic construct
MTADGYLPDWLEDNLSEGIREWWALKPGAPQPKANQQHQDNARGLVLPGYKYLGPGNGLDKGEPVNAADAAALEHDKAYDQQLKAGDNPYLKYNHADAEFQERLKEDTSFGGNLGRAVFQAKKRLLEPLGLVEEAAKTAPGKKRPVEQSPQEPDSSAGIGKSGAQPAKKRLNFGQTGDTESVPDPQPIGEPPAAPSGVGSLTMASGGGAPVADNNEGADGVGSSSGNWHCDSQWLGDRVITTSTRTWALPTYNNHLYKQISNSTSGGSSNDNAYFGYSTPWGYFDFNRFHCHFSPRDWQRLINNNWGFRPKQLNFKLFNIQVKEVTDNNGVKTIANNLTSTVQVFGDSDYQLPYVLGSAHEGCLPPFPADVFMIPQYGYLTLNDGSQAVGRSSFYCLEYFPSQMLRTGNNFQFSYEFENVPFHSSYAHSQSLDRLMNPLIDQYLYYLSKTINGSGQNQQTLKFSVAGPSNMAVQGRNYIPGPSYRQQRVSTTVTQNNNSEIAWPRASSWALNGRNSLMNPGPAMASHKEGEDRFFPLSGSLIFGKQGTGRDNVDADKVMITNEEEIKTTNPVATESYGQVATNHQSAQAQAQTGWVQNQGILPGMVWQDRDVYLQGPIWAKIPHTDGNFHPSPLMGGFGMKHPPPQILIKNTPVPADPPTAFNKDKLNSFITQYSTGQVSVEIEWELQKENSKRWNPEIQYTSNLYKSNNVEFAVNTEGVYSEPRPIGTRYLTRNL

SEQ ID NO: 950 - protein, 736 aa, synthetic construct
MTADGYLPDWLEDNLSEGIREWWALKPGAPQPKANQQHQDNARGLVLPGYKYLGPGNGLDKGEPVNAADAAALEHDKAYDQQLKAGDNPYLKYNHADAEFQERLKEDTSFGGNLGRAVFQAKKRLLEPLGLVEEAAKTAPGKKRPVEQSPQEPDSSAGIGKSGAQPAKKRLNFGQTGDTESVPDPQPIGEPPAAPSGVGSLTMASGGGAPVADNNEGADGVGSSSGNWHCDSQWLGDRVITTSTRTWALPTYNNHLYKQISNSTSGGSSNDNAYFGYSTPWGYFDFNRFHCHFSPRDWQRLINNNWGFRPKQLNFKLFNIQVKEVTDNNGVKTIANNLTSTVQVFGDSDYQLPYVLGSAHEGCLPPFPADVFMIPQYGYLTLNDGSQAVGRSSFYCLEYFPSQMLRTGNNFQFSYEFENVPFHSSYAHSQSLDRLMNPLIDQYLYYLSKTINGSGQNQQTLKFSVAGPSNMAVQGRNYIPGPSYRQQRVSTTVTQNNNSEIAWPGASSWALNGRNSLMNPGPAMASHKEGEDRFFPLSGSLIFGKQGTGRDNVDADKVMITNEEEIKTTNPVATESYGQVATNHQSAQAQAQTGWVQNQGILPGMVWQDRDVYLQGPIWAKIPHTDGNFHPSPLMGGFGMKHPPPQILIKNTPVPADPPTAFNKDKLNSFITQYSTGQVSVEIEWELQKENSKRWNPEIQYTSNLCKSNNVEFAVNTEGVYSEPRPIGTRYLTRNL

SEQ ID NO: 951 - protein, 736 aa, synthetic construct
MTADGYLPDWLEDNLSEGIREWWALKPGAPQPKANQQHQDNARGLVLPGYKYLGPGNGLDKGEPVNAADAAALEHDKAYDQQLKAGDNPYLKYNHADAEFQERLKEDTSFGGNLGRAVFQAKKRLLEPLGLVEEAAKTAPGKKRPVEQSPQEPDSSAGIGKSGAQPAKKRLNFGQTGDTESVPDPQPIGEPPAAPSGVGSLTMASGGGAPVADNNEGADGVGSSSGNWHCDSQWLGDRVITTSTRTWALPTYNNHLYKQISNSTSGGSSNDNAYFGYSTPWGYFDFNRFHCHFSPRDWQRLINNNWGFRPKQLNFKLFNIQVKEVTDNNGVKTIANNLTSTVQVFGDSDYQLPYVLGSAHEGCLPPFPADVFMIPQYGYLTLNDGSQAVGRSSFYCLEYFPSQMLRTGNNFQFSYEFENVPFHSSYAHSQSLDRLMNPLIDQYLYYLSKTINGSGQNQQTLKFSVAGPSNMAVQGRNYIPGPSYRQQRVSTTVTQNNNSEFAWPRASSWALNGRNSLMNPGPAMASHKEGEDRFFPLSGSLIFGKQGTGRDNVDADKVMITNEEEIKTTNPVATESYGQVATNHQSAQAQAQTGWVQNQGILPGMVWQDRDVYLQGPIWAKIPHTDGNFHPSPLMGGFGMKHPPPQILIKNTPVPADPPTAFNKDKLNSFITQYSTGQVSVEIEWELQKENSKRWNPEIQYTSNLCKSNNVEFAVNTEGVYSEPRPIGTRYLTRNL

SEQ ID NO: 952 - protein, 736 aa, synthetic construct
MTADGYLPDWLEDNLSEGIREWWALKPGAPQPKANQQHQDNARGLVLPGYKYLGPGNGLDKGEPVNAADAAALEHDKAYDQQLKAGDNPYLKYNHADAEFQERLKEDTSFGGNLGRAVFQAKKRLLEPLGLVEEAAKTAPGKKRPVEQSPQEPDSSAGIGKSGAQPAKKRLNFGQTGDTESVPDPQPIGEPPAAPSGVGSLTMASGGGAPVADNNEGADGVGSSSGNWHCDSQWLGDRVITTSTRTWALPTYNNHLYKQISNSTSGGSSNDNAYFGYSTPWGYFDFNRFHCHFSPRDWQRLINNNWGFRPKQLNFKLFNIQVKEVTDNNGVKTIANNLTSTVQVFGDSDYQLPYVLGSAHEGCLPPFPADVFMIPQYGYLTLNDGSQAVGRSSFYCLEYFPSQMLRTGNNFQFSYEFENVPFHSSYAHSQSLDRLMNPLIDQYLYYLSKTINGSGQNQQTLKFSVAGPSNMAVQGRNYIPGPSYRQQRVSTTVTQNNNSEIAWPRASSWALNGRNSLMNPGPAMASHKEGEDRFFPLSGSLIFGKQGTGRDNVDADKVMITNEEEIKTTNPVATESYGQVATNHQSAQAQAQTGWVQNQGILPGMVWQDRDVYLQGPIWAKIPHTDGNFHPSPLMGGFGMKHPPPQILIKNTPVPADPPTAFNKDKLNSFITQYSTGQVSVEIEWELQKENSKRWNPEIQYTSNLCKSNNVEFAVNTEGVYSEPRPIGTRYLTRNL

SEQ ID NO: 953 - protein, 736 aa, synthetic construct
MTADGYLPDWLEDNLSEGIREWWALKPGAPQPKANQQHQDNARGLVLPGYKYLGPGNGLDKGEPVNAADAAALEHDKAYDQQLKAGDNPYLKYNHADAEFQERLKEDTSFGGNLGRAVFQAKKRLLEPLGLVEEAAKTAPGKKRPVEQSPQEPDSSAGIGKSGAQPAKKRLNFGQTGDTESVPDPQPIGEPPAAPSGVGSLTMASGGGAPVADNNEGADGVGSSSGNWHCDSQWLGDRVITTSTRTWALPTYNNHLYKQISNSTSGGSSNDNAYFGYSTPWGYFDFNRFHCHFSPRDWQRLINNNWGFRPKQLNFKLFNIQVKEVTDNNGVKTIANNLTSTVQVFADSDYQLPYVLGSAHEGCLPPFPADVFMIPQYGYLTLNDGSQAVGRSSFYCLEYFPSQMLRTGNNFQFSYEFENVPFHSSYAHSQSLDRLMNPLIDQYLYYLSKTINGSGQNQQTLKFSVAGPSNMAVQGRNYIPGPSYRQQRVSTTVTQNNNSEFAWPGASSWALNGRNSLMNPGPAMASHKEGEDRFFPLSGSLIFGKQGTGRDNVDADKVMITNEEEIKTTNPVATESYGQVATNHQSAQAQAQTGWVQNQGILPGMVWQDRDVYLQGPIWAKIPHTDGNFHPSPLMGGFGMKHPPPQILIKNTPVPADPPTAFNKDKLNSFITQYSTGQVSVEIEWELQKENSKRWNPEIQYTSNLYKSNNVEFAVNTEGVYSEPRPIGTRYLTRNL

SEQ ID NO: 954 - protein, 736 aa, synthetic construct
MTADGYLPDWLEDNLSEGIREWWALKPGAPQPKANQQHQDNARGLVLPGYKYLGPGNGLDKGEPVNAADAAALEHDKAYDQQLKAGDNPYLKYNHADAEFQERLKEDTSFGGNLGRAVFQAKKRLLEPLGLVEEAAKTAPGKKRPVEQSPQEPDSSAGIGKSGAQPAKKRLNFGQTGDTESVPDPQPIGEPPAAPSGVGSLTMASGGGAPVADNNEGADGVGSSSGNWHCDSQWLGDRVITTSTRTWALPTYNNHLYKQISNSTSGGSSNDNAYFGYSTPWGYFDFNRFHCHFSPRDWQRLINNNWGFRPKQLNFKLFNIQVKEVTDNNGVKTIANNLTSTVQVFADSDYQLPYVLGSAHEGCLPPFPADVFMIPQYGYLTLNDGSQAVGRSSFYCLEYFPSQMLRTGNNFQFSYEFENVPFHSSYAHSQSLDRLMNPLIDQYLYYLSKTINGSGQNQQTLKFSVAGPSNMAVQGRNYIPGPSYRQQRVSTTVTQNNNSEIAWPGASSWALNGRNSLMNPGPAMASHKEGEDRFFPLSGSLIFGKQGTGRDNVDADKVMITNEEEIKTTNPVATESYGQVATNHQSAQAQAQTGWVQNQGILPGMVWQDRDVYLQGPIWAKIPHTDGNFHPSPLMGGFGMKHPPPQILIKNTPVPADPPTAFNKDKLNSFITQYSTGQVSVEIEWELQKENSKRWNPEIQYTSNLYKSNNVEFAVNTEGVYSEPRPIGTRYLTRNL

SEQ ID NO: 955 - protein, 736 aa, synthetic construct
MTADGYLPDWLEDNLSEGIREWWALKPGAPQPKANQQHQDNARGLVLPGYKYLGPGNGLDKGEPVNAADAAALEHDKAYDQQLKAGDNPYLKYNHADAEFQERLKEDTSFGGNLGRAVFQAKKRLLEPLGLVEEAAKTAPGKKRPVEQSPQEPDSSAGIGKSGAQPAKKRLNFGQTGDTESVPDPQPIGEPPAAPSGVGSLTMASGGGAPVADNNEGADGVGSSSGNWHCDSQWLGDRVITTSTRTWALPTYNNHLYKQISNSTSGGSSNDNAYFGYSTPWGYFDFNRFHCHFSPRDWQRLINNNWGFRPKQLNFKLFNIQVKEVTDNNGVKTIANNLTSTVQVFADSDYQLPYVLGSAHEGCLPPFPADVFMIPQYGYLTLNDGSQAVGRSSFYCLEYFPSQMLRTGNNFQFSYEFENVPFHSSYAHSQSLDRLMNPLIDQYLYYLSKTINGSGQNQQTLKFSVAGPSNMAVQGRNYIPGPSYRQQRVSTTVTQNNNSEFAWPRASSWALNGRNSLMNPGPAMASHKEGEDRFFPLSGSLIFGKQGTGRDNVDADKVMITNEEEIKTTNPVATESYGQVATNHQSAQAQAQTGWVQNQGILPGMVWQDRDVYLQGPIWAKIPHTDGNFHPSPLMGGFGMKHPPPQILIKNTPVPADPPTAFNKDKLNSFITQYSTGQVSVEIEWELQKENSKRWNPEIQYTSNLYKSNNVEFAVNTEGVYSEPRPIGTRYLTRNL

SEQ ID NO: 956 - protein, 736 aa, synthetic construct
MTADGYLPDWLEDNLSEGIREWWALKPGAPQPKANQQHQDNARGLVLPGYKYLGPGNGLDKGEPVNAADAAALEHDKAYDQQLKAGDNPYLKYNHADAEFQERLKEDTSFGGNLGRAVFQAKKRLLEPLGLVEEAAKTAPGKKRPVEQSPQEPDSSAGIGKSGAQPAKKRLNFGQTGDTESVPDPQPIGEPPAAPSGVGSLTMASGGGAPVADNNEGADGVGSSSGNWHCDSQWLGDRVITTSTRTWALPTYNNHLYKQISNSTSGGSSNDNAYFGYSTPWGYFDFNRFHCHFSPRDWQRLINNNWGFRPKQLNFKLFNIQVKEVTDNNGVKTIANNLTSTVQVFADSDYQLPYVLGSAHEGCLPPFPADVFMIPQYGYLTLNDGSQAVGRSSFYCLEYFPSQMLRTGNNFQFSYEFENVPFHSSYAHSQSLDRLMNPLIDQYLYYLSKTINGSGQNQQTLKFSVAGPSNMAVQGRNYIPGPSYRQQRVSTTVTQNNNSEFAWPGASSWALNGRNSLMNPGPAMASHKEGEDRFFPLSGSLIFGKQGTGRDNVDADKVMITNEEEIKTTNPVATESYGQVATNHQSAQAQAQTGWVQNQGILPGMVWQDRDVYLQGPIWAKIPHTDGNFHPSPLMGGFGMKHPPPQILIKNTPVPADPPTAFNKDKLNSFITQYSTGQVSVEIEWELQKENSKRWNPEIQYTSNLCKSNNVEFAVNTEGVYSEPRPIGTRYLTRNL

SEQ ID NO: 957 - protein, 736 aa, synthetic construct
MTADGYLPDWLEDNLSEGIREWWALKPGAPQPKANQQHQDNARGLVLPGYKYLGPGNGLDKGEPVNAADAAALEHDKAYDQQLKAGDNPYLKYNHADAEFQERLKEDTSFGGNLGRAVFQAKKRLLEPLGLVEEAAKTAPGKKRPVEQSPQEPDSSAGIGKSGAQPAKKRLNFGQTGDTESVPDPQPIGEPPAAPSGVGSLTMASGGGAPVADNNEGADGVGSSSGNWHCDSQWLGDRVITTSTRTWALPTYNNHLYKQISNSTSGGSSNDNAYFGYSTPWGYFDFNRFHCHFSPRDWQRLINNNWGFRPKQLNFKLFNIQVKEVTDNNGVKTIANNLTSTVQVFADSDYQLPYVLGSAHEGCLPPFPADVFMIPQYGYLTLNDGSQAVGRSSFYCLEYFPSQMLRTGNNFQFSYEFENVPFHSSYAHSQSLDRLMNPLIDQYLYYLSKTINGSGQNQQTLKFSVAGPSNMAVQGRNYIPGPSYRQQRVSTTVTQNNNSEIAWPRASSWALNGRNSLMNPGPAMASHKEGEDRFFPLSGSLIFGKQGTGRDNVDADKVMITNEEEIKTTNPVATESYGQVATNHQSAQAQAQTGWVQNQGILPGMVWQDRDVYLQGPIWAKIPHTDGNFHPSPLMGGFGMKHPPPQILIKNTPVPADPPTAFNKDKLNSFITQYSTGQVSVEIEWELQKENSKRWNPEIQYTSNLYKSNNVEFAVNTEGVYSEPRPIGTRYLTRNL

SEQ ID NO: 958 - protein, 736 aa, synthetic construct
MTADGYLPDWLEDNLSEGIREWWALKPGAPQPKANQQHQDNARGLVLPGYKYLGPGNGLDKGEPVNAADAAALEHDKAYDQQLKAGDNPYLKYNHADAEFQERLKEDTSFGGNLGRAVFQAKKRLLEPLGLVEEAAKTAPGKKRPVEQSPQEPDSSAGIGKSGAQPAKKRLNFGQTGDTESVPDPQPIGEPPAAPSGVGSLTMASGGGAPVADNNEGADGVGSSSGNWHCDSQWLGDRVITTSTRTWALPTYNNHLYKQISNSTSGGSSNDNAYFGYSTPWGYFDFNRFHCHFSPRDWQRLINNNWGFRPKQLNFKLFNIQVKEVTDNNGVKTIANNLTSTVQVFADSDYQLPYVLGSAHEGCLPPFPADVFMIPQYGYLTLNDGSQAVGRSSFYCLEYFPSQMLRTGNNFQFSYEFENVPFHSSYAHSQSLDRLMNPLIDQYLYYLSKTINGSGQNQQTLKFSVAGPSNMAVQGRNYIPGPSYRQQRVSTTVTQNNNSEIAWPGASSWALNGRNSLMNPGPAMASHKEGEDRFFPLSGSLIFGKQGTGRDNVDADKVMITNEEEIKTTNPVATESYGQVATNHQSAQAQAQTGWVQNQGILPGMVWQDRDVYLQGPIWAKIPHTDGNFHPSPLMGGFGMKHPPPQILIKNTPVPADPPTAFNKDKLNSFITQYSTGQVSVEIEWELQKENSKRWNPEIQYTSNLCKSNNVEFAVNTEGVYSEPRPIGTRYLTRNL

SEQ ID NO: 959 - protein, 736 aa, synthetic construct
MTADGYLPDWLEDNLSEGIREWWALKPGAPQPKANQQHQDNARGLVLPGYKYLGPGNGLDKGEPVNAADAAALEHDKAYDQQLKAGDNPYLKYNHADAEFQERLKEDTSFGGNLGRAVFQAKKRLLEPLGLVEEAAKTAPGKKRPVEQSPQEPDSSAGIGKSGAQPAKKRLNFGQTGDTESVPDPQPIGEPPAAPSGVGSLTMASGGGAPVADNNEGADGVGSSSGNWHCDSQWLGDRVITTSTRTWALPTYNNHLYKQISNSTSGGSSNDNAYFGYSTPWGYFDFNRFHCHFSPRDWQRLINNNWGFRPKQLNFKLFNIQVKEVTDNNGVKTIANNLTSTVQVFADSDYQLPYVLGSAHEGCLPPFPADVFMIPQYGYLTLNDGSQAVGRSSFYCLEYFPSQMLRTGNNFQFSYEFENVPFHSSYAHSQSLDRLMNPLIDQYLYYLSKTINGSGQNQQTLKFSVAGPSNMAVQGRNYIPGPSYRQQRVSTTVTQNNNSEFAWPRASSWALNGRNSLMNPGPAMASHKEGEDRFFPLSGSLIFGKQGTGRDNVDADKVMITNEEEIKTTNPVATESYGQVATNHQSAQAQAQTGWVQNQGILPGMVWQDRDVYLQGPIWAKIPHTDGNFHPSPLMGGFGMKHPPPQILIKNTPVPADPPTAFNKDKLNSFITQYSTGQVSVEIEWELQKENSKRWNPEIQYTSNLCKSNNVEFAVNTEGVYSEPRPIGTRYLTRNL

SEQ ID NO: 960 - protein, 736 aa, synthetic construct
MTADGYLPDWLEDNLSEGIREWWALKPGAPQPKANQQHQDNARGLVLPGYKYLGPGNGLDKGEPVNAADAAALEHDKAYDQQLKAGDNPYLKYNHADAEFQERLKEDTSFGGNLGRAVFQAKKRLLEPLGLVEEAAKTAPGKKRPVEQSPQEPDSSAGIGKSGAQPAKKRLNFGQTGDTESVPDPQPIGEPPAAPSGVGSLTMASGGGAPVADNNEGADGVGSSSGNWHCDSQWLGDRVITTSTRTWALPTYNNHLYKQISNSTSGGSSNDNAYFGYSTPWGYFDFNRFHCHFSPRDWQRLINNNWGFRPKQLNFKLFNIQVKEVTDNNGVKTIANNLTSTVQVFADSDYQLPYVLGSAHEGCLPPFPADVFMIPQYGYLTLNDGSQAVGRSSFYCLEYFPSQMLRTGNNFQFSYEFENVPFHSSYAHSQSLDRLMNPLIDQYLYYLSKTINGSGQNQQTLKFSVAGPSNMAVQGRNYIPGPSYRQQRVSTTVTQNNNSEIAWPRASSWALNGRNSLMNPGPAMASHKEGEDRFFPLSGSLIFGKQGTGRDNVDADKVMITNEEEIKTTNPVATESYGQVATNHQSAQAQAQTGWVQNQGILPGMVWQDRDVYLQGPIWAKIPHTDGNFHPSPLMGGFGMKHPPPQILIKNTPVPADPPTAFNKDKLNSFITQYSTGQVSVEIEWELQKENSKRWNPEIQYTSNLCKSNNVEFAVNTEGVYSEPRPIGTRYLTRNL

SEQ ID NO: 961 - protein, 736 aa, synthetic construct
MAADGYLPDWLEDNLSEGIREWWALKPGAPQPKANQQHQDNARGLVLPGYKYLGPGNGLDKGEPVNAADAAALEHDKAYDQQLKAGDNPYLKYNHADAEFQERLKEDTSFGGNLGRAVFQAKKRLLEPLGLVEEAAKTAPGKKRPVEQSPQEPDSSAGIGKSGAQPAKKRLNFGQTGDTESVPDPQPIGEPPAAPSGVGSLTMASGGGAPVADNNEGADGVGSSSGNWHCDSQWLGDRVITTSTRTWALPTYNNHLYKQISNSTSGGSSNDNAYFGYSTPWGYFDFNRFHCHFSPRDWQRLINNNWGFRPKRLNFKLFNIQVKEVTDNNGVKTIANNLTSTVQVFGDSDYQLPYVLGSAHEGCLPPFPADVFMIPQYGYLTLNDGSQAVGRSSFYCLEYFPSQMLRTGNNFQFSYEFENVPFHSSYAHSQSLDRLMNPLIDQYLYYLSKTINGSGQNQQTLKFSVAGPSNMAVQGRNYIPGPSYRQQRVSTTVTQNNNSEFAWPGASSWALNGRNSLMNPGPAMASHKEGEDRFFPLSGSLIFGKQGTGRDNVDADKVMITNEEEIKTTNPVATESYGQVATNHQSAQAQAQTGWVQNQGILPGMVWQDRDVYLQGPIWAKIPHTGGNFHPSPLMGGFGMKHPPPQILIKNTPVPADPPTAFNKDKLNSFITQYSTGQVSVEIEWELQKENSKRWNPEIQYTSNYYKSNNVEFAVNTGGVYSEPRPIGTRYLTRNL

SEQ ID NO: 962 - protein, 736 aa, synthetic construct
MAADGYLPDWLEDNLSEGIREWWALKPGAPQPKANQQHQDNARGLVLPGYKYLGPGNGLDKGEPVNAADAAALEHDKAYDQQLKAGDNPYLKYNHADAEFQERLKEDTSFGGNLGRAVFQAKKRLLEPLGLVEEAAKTAPGKKRPVEQSPQEPDSSAGIGKSGAQPAKKRLNFGQTGDTESVPDPQPIGEPPAAPSGVGSLTMASGGGAPVADNNEGADGVGSSSGNWHCDSQWLGDRVITTSTRTWALPTYNNHLYKQISNSTSGGSSNDNAYFGYSTPWGYFDFNRFHCHFSPRDWQRLINNNWGFRPKRLNFKLFNIQVKEVTDNNGVKTIANNLTSTVQVFGDSDYQLPYVLGSAHEGCLPPFPADVFMIPQYGYLTLNDGSQAVGRSSFYCLEYFPSQMLRTGNNFQFSYEFENVPFHSSYAHSQSLDRLMNPLIDQYLYYLSKTINGSGQNQQTLKFSVAGPSNMAVQGRNYIPGPSYRQQRVSTTVTQNNNSEIAWPGASSWALNGRNSLMNPGPAMASHKEGEDRFFPLSGSLIFGKQGTGRDNVDADKVMITNEEEIKTTNPVATESYGQVATNHQSAQAQAQTGWVQNQGILPGMVWQDRDVYLQGPIWAKIPHTGGNFHPSPLMGGFGMKHPPPQILIKNTPVPADPPTAFNKDKLNSFITQYSTGQVSVEIEWELQKENSKRWNPEIQYTSNYYKSNNVEFAVNTGGVYSEPRPIGTRYLTRNL

SEQ ID NO: 963 - protein, 736 aa, synthetic construct
MAADGYLPDWLEDNLSEGIREWWALKPGAPQPKANQQHQDNARGLVLPGYKYLGPGNGLDKGEPVNAADAAALEHDKAYDQQLKAGDNPYLKYNHADAEFQERLKEDTSFGGNLGRAVFQAKKRLLEPLGLVEEAAKTAPGKKRPVEQSPQEPDSSAGIGKSGAQPAKKRLNFGQTGDTESVPDPQPIGEPPAAPSGVGSLTMASGGGAPVADNNEGADGVGSSSGNWHCDSQWLGDRVITTSTRTWALPTYNNHLYKQISNSTSGGSSNDNAYFGYSTPWGYFDFNRFHCHFSPRDWQRLINNNWGFRPKRLNFKLFNIQVKEVTDNNGVKTIANNLTSTVQVFGDSDYQLPYVLGSAHEGCLPPFPADVFMIPQYGYLTLNDGSQAVGRSSFYCLEYFPSQMLRTGNNFQFSYEFENVPFHSSYAHSQSLDRLMNPLIDQYLYYLSKTINGSGQNQQTLKFSVAGPSNMAVQGRNYIPGPSYRQQRVSTTVTQNNNSEFAWPRASSWALNGRNSLMNPGPAMASHKEGEDRFFPLSGSLIFGKQGTGRDNVDADKVMITNEEEIKTTNPVATESYGQVATNHQSAQAQAQTGWVQNQGILPGMVWQDRDVYLQGPIWAKIPHTGGNFHPSPLMGGFGMKHPPPQILIKNTPVPADPPTAFNKDKLNSFITQYSTGQVSVEIEWELQKENSKRWNPEIQYTSNYYKSNNVEFAVNTGGVYSEPRPIGTRYLTRNL

SEQ ID NO: 964 - protein, 736 aa, synthetic construct
MAADGYLPDWLEDNLSEGIREWWALKPGAPQPKANQQHQDNARGLVLPGYKYLGPGNGLDKGEPVNAADAAALEHDKAYDQQLKAGDNPYLKYNHADAEFQERLKEDTSFGGNLGRAVFQAKKRLLEPLGLVEEAAKTAPGKKRPVEQSPQEPDSSAGIGKSGAQPAKKRLNFGQTGDTESVPDPQPIGEPPAAPSGVGSLTMASGGGAPVADNNEGADGVGSSSGNWHCDSQWLGDRVITTSTRTWALPTYNNHLYKQISNSTSGGSSNDNAYFGYSTPWGYFDFNRFHCHFSPRDWQRLINNNWGFRPKRLNFKLFNIQVKEVTDNNGVKTIANNLTSTVQVFGDSDYQLPYVLGSAHEGCLPPFPADVFMIPQYGYLTLNDGSQAVGRSSFYCLEYFPSQMLRTGNNFQFSYEFENVPFHSSYAHSQSLDRLMNPLIDQYLYYLSKTINGSGQNQQTLKFSVAGPSNMAVQGRNYIPGPSYRQQRVSTTVTQNNNSEFAWPGASSWALNGRNSLMNPGPAMASHKEGEDRFFPLSGSLIFGKQGTGRDNVDADKVMITNEEEIKTTNPVATESYGQVATNHQSAQAQAQTGWVQNQGILPGMVWQDRDVYLQGPIWAKIPHTGGNFHPSPLMGGFGMKHPPPQILIKNTPVPADPPTAFNKDKLNSFITQYSTGQVSVEIEWELQKENSKRWNPEIQYTSNYCKSNNVEFAVNTGGVYSEPRPIGTRYLTRNL

SEQ ID NO: 965 - protein, 736 aa, synthetic construct
MAADGYLPDWLEDNLSEGIREWWALKPGAPQPKANQQHQDNARGLVLPGYKYLGPGNGLDKGEPVNAADAAALEHDKAYDQQLKAGDNPYLKYNHADAEFQERLKEDTSFGGNLGRAVFQAKKRLLEPLGLVEEAAKTAPGKKRPVEQSPQEPDSSAGIGKSGAQPAKKRLNFGQTGDTESVPDPQPIGEPPAAPSGVGSLTMASGGGAPVADNNEGADGVGSSSGNWHCDSQWLGDRVITTSTRTWALPTYNNHLYKQISNSTSGGSSNDNAYFGYSTPWGYFDFNRFHCHFSPRDWQRLINNNWGFRPKRLNFKLFNIQVKEVTDNNGVKTIANNLTSTVQVFGDSDYQLPYVLGSAHEGCLPPFPADVFMIPQYGYLTLNDGSQAVGRSSFYCLEYFPSQMLRTGNNFQFSYEFENVPFHSSYAHSQSLDRLMNPLIDQYLYYLSKTINGSGQNQQTLKFSVAGPSNMAVQGRNYIPGPSYRQQRVSTTVTQNNNSEIAWPRASSWALNGRNSLMNPGPAMASHKEGEDRFFPLSGSLIFGKQGTGRDNVDADKVMITNEEEIKTTNPVATESYGQVATNHQSAQAQAQTGWVQNQGILPGMVWQDRDVYLQGPIWAKIPHTGGNFHPSPLMGGFGMKHPPPQILIKNTPVPADPPTAFNKDKLNSFITQYSTGQVSVEIEWELQKENSKRWNPEIQYTSNYYKSNNVEFAVNTGGVYSEPRPIGTRYLTRNL

SEQ ID NO: 966 - protein, 736 aa, synthetic construct
MAADGYLPDWLEDNLSEGIREWWALKPGAPQPKANQQHQDNARGLVLPGYKYLGPGNGLDKGEPVNAADAAALEHDKAYDQQLKAGDNPYLKYNHADAEFQERLKEDTSFGGNLGRAVFQAKKRLLEPLGLVEEAAKTAPGKKRPVEQSPQEPDSSAGIGKSGAQPAKKRLNFGQTGDTESVPDPQPIGEPPAAPSGVGSLTMASGGGAPVADNNEGADGVGSSSGNWHCDSQWLGDRVITTSTRTWALPTYNNHLYKQISNSTSGGSSNDNAYFGYSTPWGYFDFNRFHCHFSPRDWQRLINNNWGFRPKRLNFKLFNIQVKEVTDNNGVKTIANNLTSTVQVFGDSDYQLPYVLGSAHEGCLPPFPADVFMIPQYGYLTLNDGSQAVGRSSFYCLEYFPSQMLRTGNNFQFSYEFENVPFHSSYAHSQSLDRLMNPLIDQYLYYLSKTINGSGQNQQTLKFSVAGPSNMAVQGRNYIPGPSYRQQRVSTTVTQNNNSEIAWPGASSWALNGRNSLMNPGPAMASHKEGEDRFFPLSGSLIFGKQGTGRDNVDADKVMITNEEEIKTTNPVATESYGQVATNHQSAQAQAQTGWVQNQGILPGMVWQDRDVYLQGPIWAKIPHTGGNFHPSPLMGGFGMKHPPPQILIKNTPVPADPPTAFNKDKLNSFITQYSTGQVSVEIEWELQKENSKRWNPEIQYTSNYCKSNNVEFAVNTGGVYSEPRPIGTRYLTRNL

SEQ ID NO: 967 - protein, 736 aa, synthetic construct
MAADGYLPDWLEDNLSEGIREWWALKPGAPQPKANQQHQDNARGLVLPGYKYLGPGNGLDKGEPVNAADAAALEHDKAYDQQLKAGDNPYLKYNHADAEFQERLKEDTSFGGNLGRAVFQAKKRLLEPLGLVEEAAKTAPGKKRPVEQSPQEPDSSAGIGKSGAQPAKKRLNFGQTGDTESVPDPQPIGEPPAAPSGVGSLTMASGGGAPVADNNEGADGVGSSSGNWHCDSQWLGDRVITTSTRTWALPTYNNHLYKQISNSTSGGSSNDNAYFGYSTPWGYFDFNRFHCHFSPRDWQRLINNNWGFRPKRLNFKLFNIQVKEVTDNNGVKTIANNLTSTVQVFGDSDYQLPYVLGSAHEGCLPPFPADVFMIPQYGYLTLNDGSQAVGRSSFYCLEYFPSQMLRTGNNFQFSYEFENVPFHSSYAHSQSLDRLMNPLIDQYLYYLSKTINGSGQNQQTLKFSVAGPSNMAVQGRNYIPGPSYRQQRVSTTVTQNNNSEFAWPRASSWALNGRNSLMNPGPAMASHKEGEDRFFPLSGSLIFGKQGTGRDNVDADKVMITNEEEIKTTNPVATESYGQVATNHQSAQAQAQTGWVQNQGILPGMVWQDRDVYLQGPIWAKIPHTGGNFHPSPLMGGFGMKHPPPQILIKNTPVPADPPTAFNKDKLNSFITQYSTGQVSVEIEWELQKENSKRWNPEIQYTSNYCKSNNVEFAVNTGGVYSEPRPIGTRYLTRNL

SEQ ID NO: 968 - protein, 736 aa, synthetic construct
MAADGYLPDWLEDNLSEGIREWWALKPGAPQPKANQQHQDNARGLVLPGYKYLGPGNGLDKGEPVNAADAAALEHDKAYDQQLKAGDNPYLKYNHADAEFQERLKEDTSFGGNLGRAVFQAKKRLLEPLGLVEEAAKTAPGKKRPVEQSPQEPDSSAGIGKSGAQPAKKRLNFGQTGDTESVPDPQPIGEPPAAPSGVGSLTMASGGGAPVADNNEGADGVGSSSGNWHCDSQWLGDRVITTSTRTWALPTYNNHLYKQISNSTSGGSSNDNAYFGYSTPWGYFDFNRFHCHFSPRDWQRLINNNWGFRPKRLNFKLFNIQVKEVTDNNGVKTIANNLTSTVQVFGDSDYQLPYVLGSAHEGCLPPFPADVFMIPQYGYLTLNDGSQAVGRSSFYCLEYFPSQMLRTGNNFQFSYEFENVPFHSSYAHSQSLDRLMNPLIDQYLYYLSKTINGSGQNQQTLKFSVAGPSNMAVQGRNYIPGPSYRQQRVSTTVTQNNNSEIAWPRASSWALNGRNSLMNPGPAMASHKEGEDRFFPLSGSLIFGKQGTGRDNVDADKVMITNEEEIKTTNPVATESYGQVATNHQSAQAQAQTGWVQNQGILPGMVWQDRDVYLQGPIWAKIPHTGGNFHPSPLMGGFGMKHPPPQILIKNTPVPADPPTAFNKDKLNSFITQYSTGQVSVEIEWELQKENSKRWNPEIQYTSNYCKSNNVEFAVNTGGVYSEPRPIGTRYLTRNL

SEQ ID NO: 969 - protein, 736 aa, synthetic construct
MAADGYLPDWLEDNLSEGIREWWALKPGAPQPKANQQHQDNARGLVLPGYKYLGPGNGLDKGEPVNAADAAALEHDKAYDQQLKAGDNPYLKYNHADAEFQERLKEDTSFGGNLGRAVFQAKKRLLEPLGLVEEAAKTAPGKKRPVEQSPQEPDSSAGIGKSGAQPAKKRLNFGQTGDTESVPDPQPIGEPPAAPSGVGSLTMASGGGAPVADNNEGADGVGSSSGNWHCDSQWLGDRVITTSTRTWALPTYNNHLYKQISNSTSGGSSNDNAYFGYSTPWGYFDFNRFHCHFSPRDWQRLINNNWGFRPKRLNFKLFNIQVKEVTDNNGVKTIANNLTSTVQVFTDSDYQLPYVLGSAHEGCLPPFPADVFMIPQYGYLTLNDGSQAVGRSSFYCLEYFPSQMLRTGNNFQFSYEFENVPFHSSYAHSQSLDRLMNPLIDQYLYYLSKTINGSGQNQQTLKFSVAGPSNMAVQGRNYIPGPSYRQQRVSTTVTQNNNSEFAWPGASSWALNGRNSLMNPGPAMASHKEGEDRFFPLSGSLIFGKQGTGRDNVDADKVMITNEEEIKTTNPVATESYGQVATNHQSAQAQAQTGWVQNQGILPGMVWQDRDVYLQGPIWAKIPHTGGNFHPSPLMGGFGMKHPPPQILIKNTPVPADPPTAFNKDKLNSFITQYSTGQVSVEIEWELQKENSKRWNPEIQYTSNLYKSNNVEFAVNTGGVYSEPRPIGTRYLTRNL

SEQ ID NO: 970 - protein, 736 aa, synthetic construct
MAADGYLPDWLEDNLSEGIREWWALKPGAPQPKANQQHQDNARGLVLPGYKYLGPGNGLDKGEPVNAADAAALEHDKAYDQQLKAGDNPYLKYNHADAEFQERLKEDTSFGGNLGRAVFQAKKRLLEPLGLVEEAAKTAPGKKRPVEQSPQEPDSSAGIGKSGAQPAKKRLNFGQTGDTESVPDPQPIGEPPAAPSGVGSLTMASGGGAPVADNNEGADGVGSSSGNWHCDSQWLGDRVITTSTRTWALPTYNNHLYKQISNSTSGGSSNDNAYFGYSTPWGYFDFNRFHCHFSPRDWQRLINNNWGFRPKRLNFKLFNIQVKEVTDNNGVKTIANNLTSTVQVFTDSDYQLPYVLGSAHEGCLPPFPADVFMIPQYGYLTLNDGSQAVGRSSFYCLEYFPSQMLRTGNNFQFSYEFENVPFHSSYAHSQSLDRLMNPLIDQYLYYLSKTINGSGQNQQTLKFSVAGPSNMAVQGRNYIPGPSYRQQRVSTTVTQNNNSEIAWPGASSWALNGRNSLMNPGPAMASHKEGEDRFFPLSGSLIFGKQGTGRDNVDADKVMITNEEEIKTTNPVATESYGQVATNHQSAQAQAQTGWVQNQGILPGMVWQDRDVYLQGPIWAKIPHTGGNFHPSPLMGGFGMKHPPPQILIKNTPVPADPPTAFNKDKLNSFITQYSTGQVSVEIEWELQKENSKRWNPEIQYTSNLYKSNNVEFAVNTGGVYSEPRPIGTRYLTRNL

SEQ ID NO: 971 - protein, 736 aa, synthetic construct
MAADGYLPDWLEDNLSEGIREWWALKPGAPQPKANQQHQDNARGLVLPGYKYLGPGNGLDKGEPVNAADAAALEHDKAYDQQLKAGDNPYLKYNHADAEFQERLKEDTSFGGNLGRAVFQAKKRLLEPLGLVEEAAKTAPGKKRPVEQSPQEPDSSAGIGKSGAQPAKKRLNFGQTGDTESVPDPQPIGEPPAAPSGVGSLTMASGGGAPVADNNEGADGVGSSSGNWHCDSQWLGDRVITTSTRTWALPTYNNHLYKQISNSTSGGSSNDNAYFGYSTPWGYFDFNRFHCHFSPRDWQRLINNNWGFRPKRLNFKLFNIQVKEVTDNNGVKTIANNLTSTVQVFTDSDYQLPYVLGSAHEGCLPPFPADVFMIPQYGYLTLNDGSQAVGRSSFYCLEYFPSQMLRTGNNFQFSYEFENVPFHSSYAHSQSLDRLMNPLIDQYLYYLSKTINGSGQNQQTLKFSVAGPSNMAVQGRNYIPGPSYRQQRVSTTVTQNNNSEFAWPRASSWALNGRNSLMNPGPAMASHKEGEDRFFPLSGSLIFGKQGTGRDNVDADKVMITNEEEIKTTNPVATESYGQVATNHQSAQAQAQTGWVQNQGILPGMVWQDRDVYLQGPIWAKIPHTGGNFHPSPLMGGFGMKHPPPQILIKNTPVPADPPTAFNKDKLNSFITQYSTGQVSVEIEWELQKENSKRWNPEIQYTSNLYKSNNVEFAVNTGGVYSEPRPIGTRYLTRNL

SEQ ID NO: 972 - protein, 736 aa, synthetic construct
MAADGYLPDWLEDNLSEGIREWWALKPGAPQPKANQQHQDNARGLVLPGYKYLGPGNGLDKGEPVNAADAAALEHDKAYDQQLKAGDNPYLKYNHADAEFQERLKEDTSFGGNLGRAVFQAKKRLLEPLGLVEEAAKTAPGKKRPVEQSPQEPDSSAGIGKSGAQPAKKRLNFGQTGDTESVPDPQPIGEPPAAPSGVGSLTMASGGGAPVADNNEGADGVGSSSGNWHCDSQWLGDRVITTSTRTWALPTYNNHLYKQISNSTSGGSSNDNAYFGYSTPWGYFDFNRFHCHFSPRDWQRLINNNWGFRPKRLNFKLFNIQVKEVTDNNGVKTIANNLTSTVQVFTDSDYQLPYVLGSAHEGCLPPFPADVFMIPQYGYLTLNDGSQAVGRSSFYCLEYFPSQMLRTGNNFQFSYEFENVPFHSSYAHSQSLDRLMNPLIDQYLYYLSKTINGSGQNQQTLKFSVAGPSNMAVQGRNYIPGPSYRQQRVSTTVTQNNNSEFAWPGASSWALNGRNSLMNPGPAMASHKEGEDRFFPLSGSLIFGKQGTGRDNVDADKVMITNEEEIKTTNPVATESYGQVATNHQSAQAQAQTGWVQNQGILPGMVWQDRDVYLQGPIWAKIPHTGGNFHPSPLMGGFGMKHPPPQILIKNTPVPADPPTAFNKDKLNSFITQYSTGQVSVEIEWELQKENSKRWNPEIQYTSNLCKSNNVEFAVNTGGVYSEPRPIGTRYLTRNL

SEQ ID NO: 973 - protein, 736 aa, synthetic construct
MAADGYLPDWLEDNLSEGIREWWALKPGAPQPKANQQHQDNARGLVLPGYKYLGPGNGLDKGEPVNAADAAALEHDKAYDQQLKAGDNPYLKYNHADAEFQERLKEDTSFGGNLGRAVFQAKKRLLEPLGLVEEAAKTAPGKKRPVEQSPQEPDSSAGIGKSGAQPAKKRLNFGQTGDTESVPDPQPIGEPPAAPSGVGSLTMASGGGAPVADNNEGADGVGSSSGNWHCDSQWLGDRVITTSTRTWALPTYNNHLYKQISNSTSGGSSNDNAYFGYSTPWGYFDFNRFHCHFSPRDWQRLINNNWGFRPKRLNFKLFNIQVKEVTDNNGVKTIANNLTSTVQVFTDSDYQLPYVLGSAHEGCLPPFPADVFMIPQYGYLTLNDGSQAVGRSSFYCLEYFPSQMLRTGNNFQFSYEFENVPFHSSYAHSQSLDRLMNPLIDQYLYYLSKTINGSGQNQQTLKFSVAGPSNMAVQGRNYIPGPSYRQQRVSTTVTQNNNSEIAWPRASSWALNGRNSLMNPGPAMASHKEGEDRFFPLSGSLIFGKQGTGRDNVDADKVMITNEEEIKTTNPVATESYGQVATNHQSAQAQAQTGWVQNQGILPGMVWQDRDVYLQGPIWAKIPHTGGNFHPSPLMGGFGMKHPPPQILIKNTPVPADPPTAFNKDKLNSFITQYSTGQVSVEIEWELQKENSKRWNPEIQYTSNLYKSNNVEFAVNTGGVYSEPRPIGTRYLTRNL

SEQ ID NO: 974 - protein, 736 aa, synthetic construct
MAADGYLPDWLEDNLSEGIREWWALKPGAPQPKANQQHQDNARGLVLPGYKYLGPGNGLDKGEPVNAADAAALEHDKAYDQQLKAGDNPYLKYNHADAEFQERLKEDTSFGGNLGRAVFQAKKRLLEPLGLVEEAAKTAPGKKRPVEQSPQEPDSSAGIGKSGAQPAKKRLNFGQTGDTESVPDPQPIGEPPAAPSGVGSLTMASGGGAPVADNNEGADGVGSSSGNWHCDSQWLGDRVITTSTRTWALPTYNNHLYKQISNSTSGGSSNDNAYFGYSTPWGYFDFNRFHCHFSPRDWQRLINNNWGFRPKRLNFKLFNIQVKEVTDNNGVKTIANNLTSTVQVFTDSDYQLPYVLGSAHEGCLPPFPADVFMIPQYGYLTLNDGSQAVGRSSFYCLEYFPSQMLRTGNNFQFSYEFENVPFHSSYAHSQSLDRLMNPLIDQYLYYLSKTINGSGQNQQTLKFSVAGPSNMAVQGRNYIPGPSYRQQRVSTTVTQNNNSEIAWPGASSWALNGRNSLMNPGPAMASHKEGEDRFFPLSGSLIFGKQGTGRDNVDADKVMITNEEEIKTTNPVATESYGQVATNHQSAQAQAQTGWVQNQGILPGMVWQDRDVYLQGPIWAKIPHTGGNFHPSPLMGGFGMKHPPPQILIKNTPVPADPPTAFNKDKLNSFITQYSTGQVSVEIEWELQKENSKRWNPEIQYTSNLCKSNNVEFAVNTGGVYSEPRPIGTRYLTRNL

SEQ ID NO: 975 - protein, 736 aa, synthetic construct
MAADGYLPDWLEDNLSEGIREWWALKPGAPQPKANQQHQDNARGLVLPGYKYLGPGNGLDKGEPVNAADAAALEHDKAYDQQLKAGDNPYLKYNHADAEFQERLKEDTSFGGNLGRAVFQAKKRLLEPLGLVEEAAKTAPGKKRPVEQSPQEPDSSAGIGKSGAQPAKKRLNFGQTGDTESVPDPQPIGEPPAAPSGVGSLTMASGGGAPVADNNEGADGVGSSSGNWHCDSQWLGDRVITTSTRTWALPTYNNHLYKQISNSTSGGSSNDNAYFGYSTPWGYFDFNRFHCHFSPRDWQRLINNNWGFRPKRLNFKLFNIQVKEVTDNNGVKTIANNLTSTVQVFTDSDYQLPYVLGSAHEGCLPPFPADVFMIPQYGYLTLNDGSQAVGRSSFYCLEYFPSQMLRTGNNFQFSYEFENVPFHSSYAHSQSLDRLMNPLIDQYLYYLSKTINGSGQNQQTLKFSVAGPSNMAVQGRNYIPGPSYRQQRVSTTVTQNNNSEFAWPRASSWALNGRNSLMNPGPAMASHKEGEDRFFPLSGSLIFGKQGTGRDNVDADKVMITNEEEIKTTNPVATESYGQVATNHQSAQAQAQTGWVQNQGILPGMVWQDRDVYLQGPIWAKIPHTGGNFHPSPLMGGFGMKHPPPQILIKNTPVPADPPTAFNKDKLNSFITQYSTGQVSVEIEWELQKENSKRWNPEIQYTSNLCKSNNVEFAVNTGGVYSEPRPIGTRYLTRNL

SEQ ID NO: 976 - protein, 736 aa, synthetic construct
MAADGYLPDWLEDNLSEGIREWWALKPGAPQPKANQQHQDNARGLVLPGYKYLGPGNGLDKGEPVNAADAAALEHDKAYDQQLKAGDNPYLKYNHADAEFQERLKEDTSFGGNLGRAVFQAKKRLLEPLGLVEEAAKTAPGKKRPVEQSPQEPDSSAGIGKSGAQPAKKRLNFGQTGDTESVPDPQPIGEPPAAPSGVGSLTMASGGGAPVADNNEGADGVGSSSGNWHCDSQWLGDRVITTSTRTWALPTYNNHLYKQISNSTSGGSSNDNAYFGYSTPWGYFDFNRFHCHFSPRDWQRLINNNWGFRPKRLNFKLFNIQVKEVTDNNGVKTIANNLTSTVQVFTDSDYQLPYVLGSAHEGCLPPFPADVFMIPQYGYLTLNDGSQAVGRSSFYCLEYFPSQMLRTGNNFQFSYEFENVPFHSSYAHSQSLDRLMNPLIDQYLYYLSKTINGSGQNQQTLKFSVAGPSNMAVQGRNYIPGPSYRQQRVSTTVTQNNNSEIAWPRASSWALNGRNSLMNPGPAMASHKEGEDRFFPLSGSLIFGKQGTGRDNVDADKVMITNEEEIKTTNPVATESYGQVATNHQSAQAQAQTGWVQNQGILPGMVWQDRDVYLQGPIWAKIPHTGGNFHPSPLMGGFGMKHPPPQILIKNTPVPADPPTAFNKDKLNSFITQYSTGQVSVEIEWELQKENSKRWNPEIQYTSNLCKSNNVEFAVNTGGVYSEPRPIGTRYLTRNL

SEQ ID NO: 977 - protein, 736 aa, synthetic construct
MAADGYLPDWLEDNLSEGIREWWALKPGAPQPKANQQHQDNARGLVLPGYKYLGPGNGLDKGEPVNAADAAALEHDKAYDQQLKAGDNPYLKYNHADAEFQERLKEDTSFGGNLGRAVFQAKKRLLEPLGLVEEAAKTAPGKKRPVEQSPQEPDSSAGIGKSGAQPAKKRLNFGQTGDTESVPDPQPIGEPPAAPSGVGSLTMASGGGAPVADNNEGADGVGSSSGNWHCDSQWLGDRVITTSTRTWALPTYNNHLYKQISNSTSGGSSNDNAYFGYSTPWGYFDFNRFHCHFSPRDWQRLINNNWGFRPKRLNFKLFNIQVKEVTDNNGVKTIANNLTSTVQVFGDSDYQLPYVLGSAHEGCLPPFPADVFMIPQYGYLTLNDGSQAVGRSSFYCLEYFPSQMLRTGNNFQFSYEFENVPFHSSYAHSQSLDRLMNPLIDQYLYYLSKTINGSGQNQQTLKFSVAGPSNMAVQGRNYIPGPSYRQQRVSTTVTQNNNSEFAWPGASSWALNGRNSLMNPGPAMASHKEGEDRFFPLSGSLIFGKQGTGRDNVDADKVMITNEEEIKTTNPVATESYGQVATNHQSAQAQAQTGWVQNQGILPGMVWQDRDVYLQGPIWAKIPHTGGNFHPSPLMGGFGMKHPPPQILIKNTPVPADPPTAFNKDKLNSFITQYSTGQVSVEIEWELQKENSKRWNPEIQYTSNLYKSNNVEFAVNTGGVYSEPRPIGTRYLTRNL

SEQ ID NO: 978 - protein, 736 aa, synthetic construct
MAADGYLPDWLEDNLSEGIREWWALKPGAPQPKANQQHQDNARGLVLPGYKYLGPGNGLDKGEPVNAADAAALEHDKAYDQQLKAGDNPYLKYNHADAEFQERLKEDTSFGGNLGRAVFQAKKRLLEPLGLVEEAAKTAPGKKRPVEQSPQEPDSSAGIGKSGAQPAKKRLNFGQTGDTESVPDPQPIGEPPAAPSGVGSLTMASGGGAPVADNNEGADGVGSSSGNWHCDSQWLGDRVITTSTRTWALPTYNNHLYKQISNSTSGGSSNDNAYFGYSTPWGYFDFNRFHCHFSPRDWQRLINNNWGFRPKRLNFKLFNIQVKEVTDNNGVKTIANNLTSTVQVFGDSDYQLPYVLGSAHEGCLPPFPADVFMIPQYGYLTLNDGSQAVGRSSFYCLEYFPSQMLRTGNNFQFSYEFENVPFHSSYAHSQSLDRLMNPLIDQYLYYLSKTINGSGQNQQTLKFSVAGPSNMAVQGRNYIPGPSYRQQRVSTTVTQNNNSEIAWPGASSWALNGRNSLMNPGPAMASHKEGEDRFFPLSGSLIFGKQGTGRDNVDADKVMITNEEEIKTTNPVATESYGQVATNHQSAQAQAQTGWVQNQGILPGMVWQDRDVYLQGPIWAKIPHTGGNFHPSPLMGGFGMKHPPPQILIKNTPVPADPPTAFNKDKLNSFITQYSTGQVSVEIEWELQKENSKRWNPEIQYTSNLYKSNNVEFAVNTGGVYSEPRPIGTRYLTRNL

SEQ ID NO: 979 - protein, 736 aa, synthetic construct
MAADGYLPDWLEDNLSEGIREWWALKPGAPQPKANQQHQDNARGLVLPGYKYLGPGNGLDKGEPVNAADAAALEHDKAYDQQLKAGDNPYLKYNHADAEFQERLKEDTSFGGNLGRAVFQAKKRLLEPLGLVEEAAKTAPGKKRPVEQSPQEPDSSAGIGKSGAQPAKKRLNFGQTGDTESVPDPQPIGEPPAAPSGVGSLTMASGGGAPVADNNEGADGVGSSSGNWHCDSQWLGDRVITTSTRTWALPTYNNHLYKQISNSTSGGSSNDNAYFGYSTPWGYFDFNRFHCHFSPRDWQRLINNNWGFRPKRLNFKLFNIQVKEVTDNNGVKTIANNLTSTVQVFGDSDYQLPYVLGSAHEGCLPPFPADVFMIPQYGYLTLNDGSQAVGRSSFYCLEYFPSQMLRTGNNFQFSYEFENVPFHSSYAHSQSLDRLMNPLIDQYLYYLSKTINGSGQNQQTLKFSVAGPSNMAVQGRNYIPGPSYRQQRVSTTVTQNNNSEFAWPRASSWALNGRNSLMNPGPAMASHKEGEDRFFPLSGSLIFGKQGTGRDNVDADKVMITNEEEIKTTNPVATESYGQVATNHQSAQAQAQTGWVQNQGILPGMVWQDRDVYLQGPIWAKIPHTGGNFHPSPLMGGFGMKHPPPQILIKNTPVPADPPTAFNKDKLNSFITQYSTGQVSVEIEWELQKENSKRWNPEIQYTSNLYKSNNVEFAVNTGGVYSEPRPIGTRYLTRNL

SEQ ID NO: 980 - protein, 736 aa, synthetic construct
MAADGYLPDWLEDNLSEGIREWWALKPGAPQPKANQQHQDNARGLVLPGYKYLGPGNGLDKGEPVNAADAAALEHDKAYDQQLKAGDNPYLKYNHADAEFQERLKEDTSFGGNLGRAVFQAKKRLLEPLGLVEEAAKTAPGKKRPVEQSPQEPDSSAGIGKSGAQPAKKRLNFGQTGDTESVPDPQPIGEPPAAPSGVGSLTMASGGGAPVADNNEGADGVGSSSGNWHCDSQWLGDRVITTSTRTWALPTYNNHLYKQISNSTSGGSSNDNAYFGYSTPWGYFDFNRFHCHFSPRDWQRLINNNWGFRPKRLNFKLFNIQVKEVTDNNGVKTIANNLTSTVQVFGDSDYQLPYVLGSAHEGCLPPFPADVFMIPQYGYLTLNDGSQAVGRSSFYCLEYFPSQMLRTGNNFQFSYEFENVPFHSSYAHSQSLDRLMNPLIDQYLYYLSKTINGSGQNQQTLKFSVAGPSNMAVQGRNYIPGPSYRQQRVSTTVTQNNNSEFAWPGASSWALNGRNSLMNPGPAMASHKEGEDRFFPLSGSLIFGKQGTGRDNVDADKVMITNEEEIKTTNPVATESYGQVATNHQSAQAQAQTGWVQNQGILPGMVWQDRDVYLQGPIWAKIPHTGGNFHPSPLMGGFGMKHPPPQILIKNTPVPADPPTAFNKDKLNSFITQYSTGQVSVEIEWELQKENSKRWNPEIQYTSNLCKSNNVEFAVNTGGVYSEPRPIGTRYLTRNL

SEQ ID NO: 981 - protein, 736 aa, synthetic construct
MAADGYLPDWLEDNLSEGIREWWALKPGAPQPKANQQHQDNARGLVLPGYKYLGPGNGLDKGEPVNAADAAALEHDKAYDQQLKAGDNPYLKYNHADAEFQERLKEDTSFGGNLGRAVFQAKKRLLEPLGLVEEAAKTAPGKKRPVEQSPQEPDSSAGIGKSGAQPAKKRLNFGQTGDTESVPDPQPIGEPPAAPSGVGSLTMASGGGAPVADNNEGADGVGSSSGNWHCDSQWLGDRVITTSTRTWALPTYNNHLYKQISNSTSGGSSNDNAYFGYSTPWGYFDFNRFHCHFSPRDWQRLINNNWGFRPKRLNFKLFNIQVKEVTDNNGVKTIANNLTSTVQVFGDSDYQLPYVLGSAHEGCLPPFPADVFMIPQYGYLTLNDGSQAVGRSSFYCLEYFPSQMLRTGNNFQFSYEFENVPFHSSYAHSQSLDRLMNPLIDQYLYYLSKTINGSGQNQQTLKFSVAGPSNMAVQGRNYIPGPSYRQQRVSTTVTQNNNSEIAWPRASSWALNGRNSLMNPGPAMASHKEGEDRFFPLSGSLIFGKQGTGRDNVDADKVMITNEEEIKTTNPVATESYGQVATNHQSAQAQAQTGWVQNQGILPGMVWQDRDVYLQGPIWAKIPHTGGNFHPSPLMGGFGMKHPPPQILIKNTPVPADPPTAFNKDKLNSFITQYSTGQVSVEIEWELQKENSKRWNPEIQYTSNLYKSNNVEFAVNTGGVYSEPRPIGTRYLTRNL

SEQ ID NO: 982 - protein, 736 aa, synthetic construct
MAADGYLPDWLEDNLSEGIREWWALKPGAPQPKANQQHQDNARGLVLPGYKYLGPGNGLDKGEPVNAADAAALEHDKAYDQQLKAGDNPYLKYNHADAEFQERLKEDTSFGGNLGRAVFQAKKRLLEPLGLVEEAAKTAPGKKRPVEQSPQEPDSSAGIGKSGAQPAKKRLNFGQTGDTESVPDPQPIGEPPAAPSGVGSLTMASGGGAPVADNNEGADGVGSSSGNWHCDSQWLGDRVITTSTRTWALPTYNNHLYKQISNSTSGGSSNDNAYFGYSTPWGYFDFNRFHCHFSPRDWQRLINNNWGFRPKRLNFKLFNIQVKEVTDNNGVKTIANNLTSTVQVFGDSDYQLPYVLGSAHEGCLPPFPADVFMIPQYGYLTLNDGSQAVGRSSFYCLEYFPSQMLRTGNNFQFSYEFENVPFHSSYAHSQSLDRLMNPLIDQYLYYLSKTINGSGQNQQTLKFSVAGPSNMAVQGRNYIPGPSYRQQRVSTTVTQNNNSEIAWPGASSWALNGRNSLMNPGPAMASHKEGEDRFFPLSGSLIFGKQGTGRDNVDADKVMITNEEEIKTTNPVATESYGQVATNHQSAQAQAQTGWVQNQGILPGMVWQDRDVYLQGPIWAKIPHTGGNFHPSPLMGGFGMKHPPPQILIKNTPVPADPPTAFNKDKLNSFITQYSTGQVSVEIEWELQKENSKRWNPEIQYTSNLCKSNNVEFAVNTGGVYSEPRPIGTRYLTRNL

SEQ ID NO: 983 - protein, 736 aa, synthetic construct
MAADGYLPDWLEDNLSEGIREWWALKPGAPQPKANQQHQDNARGLVLPGYKYLGPGNGLDKGEPVNAADAAALEHDKAYDQQLKAGDNPYLKYNHADAEFQERLKEDTSFGGNLGRAVFQAKKRLLEPLGLVEEAAKTAPGKKRPVEQSPQEPDSSAGIGKSGAQPAKKRLNFGQTGDTESVPDPQPIGEPPAAPSGVGSLTMASGGGAPVADNNEGADGVGSSSGNWHCDSQWLGDRVITTSTRTWALPTYNNHLYKQISNSTSGGSSNDNAYFGYSTPWGYFDFNRFHCHFSPRDWQRLINNNWGFRPKRLNFKLFNIQVKEVTDNNGVKTIANNLTSTVQVFGDSDYQLPYVLGSAHEGCLPPFPADVFMIPQYGYLTLNDGSQAVGRSSFYCLEYFPSQMLRTGNNFQFSYEFENVPFHSSYAHSQSLDRLMNPLIDQYLYYLSKTINGSGQNQQTLKFSVAGPSNMAVQGRNYIPGPSYRQQRVSTTVTQNNNSEFAWPRASSWALNGRNSLMNPGPAMASHKEGEDRFFPLSGSLIFGKQGTGRDNVDADKVMITNEEEIKTTNPVATESYGQVATNHQSAQAQAQTGWVQNQGILPGMVWQDRDVYLQGPIWAKIPHTGGNFHPSPLMGGFGMKHPPPQILIKNTPVPADPPTAFNKDKLNSFITQYSTGQVSVEIEWELQKENSKRWNPEIQYTSNLCKSNNVEFAVNTGGVYSEPRPIGTRYLTRNL

SEQ ID NO: 984 - protein, 736 aa, synthetic construct
MAADGYLPDWLEDNLSEGIREWWALKPGAPQPKANQQHQDNARGLVLPGYKYLGPGNGLDKGEPVNAADAAALEHDKAYDQQLKAGDNPYLKYNHADAEFQERLKEDTSFGGNLGRAVFQAKKRLLEPLGLVEEAAKTAPGKKRPVEQSPQEPDSSAGIGKSGAQPAKKRLNFGQTGDTESVPDPQPIGEPPAAPSGVGSLTMASGGGAPVADNNEGADGVGSSSGNWHCDSQWLGDRVITTSTRTWALPTYNNHLYKQISNSTSGGSSNDNAYFGYSTPWGYFDFNRFHCHFSPRDWQRLINNNWGFRPKRLNFKLFNIQVKEVTDNNGVKTIANNLTSTVQVFGDSDYQLPYVLGSAHEGCLPPFPADVFMIPQYGYLTLNDGSQAVGRSSFYCLEYFPSQMLRTGNNFQFSYEFENVPFHSSYAHSQSLDRLMNPLIDQYLYYLSKTINGSGQNQQTLKFSVAGPSNMAVQGRNYIPGPSYRQQRVSTTVTQNNNSEIAWPRASSWALNGRNSLMNPGPAMASHKEGEDRFFPLSGSLIFGKQGTGRDNVDADKVMITNEEEIKTTNPVATESYGQVATNHQSAQAQAQTGWVQNQGILPGMVWQDRDVYLQGPIWAKIPHTGGNFHPSPLMGGFGMKHPPPQILIKNTPVPADPPTAFNKDKLNSFITQYSTGQVSVEIEWELQKENSKRWNPEIQYTSNLCKSNNVEFAVNTGGVYSEPRPIGTRYLTRNL

SEQ ID NO: 985 - protein, 736 aa, synthetic construct
MAADGYLPDWLEDNLSEGIREWWALKPGAPQPKANQQHQDNARGLVLPGYKYLGPGNGLDKGEPVNAADAAALEHDKAYDQQLKAGDNPYLKYNHADAEFQERLKEDTSFGGNLGRAVFQAKKRLLEPLGLVEEAAKTAPGKKRPVEQSPQEPDSSAGIGKSGAQPAKKRLNFGQTGDTESVPDPQPIGEPPAAPSGVGSLTMASGGGAPVADNNEGADGVGSSSGNWHCDSQWLGDRVITTSTRTWALPTYNNHLYKQISNSTSGGSSNDNAYFGYSTPWGYFDFNRFHCHFSPRDWQRLINNNWGFRPKRLNFKLFNIQVKEVTDNNGVKTIANNLTSTVQVFADSDYQLPYVLGSAHEGCLPPFPADVFMIPQYGYLTLNDGSQAVGRSSFYCLEYFPSQMLRTGNNFQFSYEFENVPFHSSYAHSQSLDRLMNPLIDQYLYYLSKTINGSGQNQQTLKFSVAGPSNMAVQGRNYIPGPSYRQQRVSTTVTQNNNSEFAWPGASSWALNGRNSLMNPGPAMASHKEGEDRFFPLSGSLIFGKQGTGRDNVDADKVMITNEEEIKTTNPVATESYGQVATNHQSAQAQAQTGWVQNQGILPGMVWQDRDVYLQGPIWAKIPHTGGNFHPSPLMGGFGMKHPPPQILIKNTPVPADPPTAFNKDKLNSFITQYSTGQVSVEIEWELQKENSKRWNPEIQYTSNLYKSNNVEFAVNTGGVYSEPRPIGTRYLTRNL

SEQ ID NO: 986 - protein, 736 aa, synthetic construct
MAADGYLPDWLEDNLSEGIREWWALKPGAPQPKANQQHQDNARGLVLPGYKYLGPGNGLDKGEPVNAADAAALEHDKAYDQQLKAGDNPYLKYNHADAEFQERLKEDTSFGGNLGRAVFQAKKRLLEPLGLVEEAAKTAPGKKRPVEQSPQEPDSSAGIGKSGAQPAKKRLNFGQTGDTESVPDPQPIGEPPAAPSGVGSLTMASGGGAPVADNNEGADGVGSSSGNWHCDSQWLGDRVITTSTRTWALPTYNNHLYKQISNSTSGGSSNDNAYFGYSTPWGYFDFNRFHCHFSPRDWQRLINNNWGFRPKRLNFKLFNIQVKEVTDNNGVKTIANNLTSTVQVFADSDYQLPYVLGSAHEGCLPPFPADVFMIPQYGYLTLNDGSQAVGRSSFYCLEYFPSQMLRTGNNFQFSYEFENVPFHSSYAHSQSLDRLMNPLIDQYLYYLSKTINGSGQNQQTLKFSVAGPSNMAVQGRNYIPGPSYRQQRVSTTVTQNNNSEIAWPGASSWALNGRNSLMNPGPAMASHKEGEDRFFPLSGSLIFGKQGTGRDNVDADKVMITNEEEIKTTNPVATESYGQVATNHQSAQAQAQTGWVQNQGILPGMVWQDRDVYLQGPIWAKIPHTGGNFHPSPLMGGFGMKHPPPQILIKNTPVPADPPTAFNKDKLNSFITQYSTGQVSVEIEWELQKENSKRWNPEIQYTSNLYKSNNVEFAVNTGGVYSEPRPIGTRYLTRNL

SEQ ID NO: 987 - protein, 736 aa, synthetic construct
MAADGYLPDWLEDNLSEGIREWWALKPGAPQPKANQQHQDNARGLVLPGYKYLGPGNGLDKGEPVNAADAAALEHDKAYDQQLKAGDNPYLKYNHADAEFQERLKEDTSFGGNLGRAVFQAKKRLLEPLGLVEEAAKTAPGKKRPVEQSPQEPDSSAGIGKSGAQPAKKRLNFGQTGDTESVPDPQPIGEPPAAPSGVGSLTMASGGGAPVADNNEGADGVGSSSGNWHCDSQWLGDRVITTSTRTWALPTYNNHLYKQISNSTSGGSSNDNAYFGYSTPWGYFDFNRFHCHFSPRDWQRLINNNWGFRPKRLNFKLFNIQVKEVTDNNGVKTIANNLTSTVQVFADSDYQLPYVLGSAHEGCLPPFPADVFMIPQYGYLTLNDGSQAVGRSSFYCLEYFPSQMLRTGNNFQFSYEFENVPFHSSYAHSQSLDRLMNPLIDQYLYYLSKTINGSGQNQQTLKFSVAGPSNMAVQGRNYIPGPSYRQQRVSTTVTQNNNSEFAWPRASSWALNGRNSLMNPGPAMASHKEGEDRFFPLSGSLIFGKQGTGRDNVDADKVMITNEEEIKTTNPVATESYGQVATNHQSAQAQAQTGWVQNQGILPGMVWQDRDVYLQGPIWAKIPHTGGNFHPSPLMGGFGMKHPPPQILIKNTPVPADPPTAFNKDKLNSFITQYSTGQVSVEIEWELQKENSKRWNPEIQYTSNLYKSNNVEFAVNTGGVYSEPRPIGTRYLTRNL

SEQ ID NO: 988 - protein, 736 aa, synthetic construct
MAADGYLPDWLEDNLSEGIREWWALKPGAPQPKANQQHQDNARGLVLPGYKYLGPGNGLDKGEPVNAADAAALEHDKAYDQQLKAGDNPYLKYNHADAEFQERLKEDTSFGGNLGRAVFQAKKRLLEPLGLVEEAAKTAPGKKRPVEQSPQEPDSSAGIGKSGAQPAKKRLNFGQTGDTESVPDPQPIGEPPAAPSGVGSLTMASGGGAPVADNNEGADGVGSSSGNWHCDSQWLGDRVITTSTRTWALPTYNNHLYKQISNSTSGGSSNDNAYFGYSTPWGYFDFNRFHCHFSPRDWQRLINNNWGFRPKRLNFKLFNIQVKEVTDNNGVKTIANNLTSTVQVFADSDYQLPYVLGSAHEGCLPPFPADVFMIPQYGYLTLNDGSQAVGRSSFYCLEYFPSQMLRTGNNFQFSYEFENVPFHSSYAHSQSLDRLMNPLIDQYLYYLSKTINGSGQNQQTLKFSVAGPSNMAVQGRNYIPGPSYRQQRVSTTVTQNNNSEFAWPGASSWALNGRNSLMNPGPAMASHKEGEDRFFPLSGSLIFGKQGTGRDNVDADKVMITNEEEIKTTNPVATESYGQVATNHQSAQAQAQTGWVQNQGILPGMVWQDRDVYLQGPIWAKIPHTGGNFHPSPLMGGFGMKHPPPQILIKNTPVPADPPTAFNKDKLNSFITQYSTGQVSVEIEWELQKENSKRWNPEIQYTSNLCKSNNVEFAVNTGGVYSEPRPIGTRYLTRNL

SEQ ID NO: 989 - protein, 736 aa, synthetic construct
MAADGYLPDWLEDNLSEGIREWWALKPGAPQPKANQQHQDNARGLVLPGYKYLGPGNGLDKGEPVNAADAAALEHDKAYDQQLKAGDNPYLKYNHADAEFQERLKEDTSFGGNLGRAVFQAKKRLLEPLGLVEEAAKTAPGKKRPVEQSPQEPDSSAGIGKSGAQPAKKRLNFGQTGDTESVPDPQPIGEPPAAPSGVGSLTMASGGGAPVADNNEGADGVGSSSGNWHCDSQWLGDRVITTSTRTWALPTYNNHLYKQISNSTSGGSSNDNAYFGYSTPWGYFDFNRFHCHFSPRDWQRLINNNWGFRPKRLNFKLFNIQVKEVTDNNGVKTIANNLTSTVQVFADSDYQLPYVLGSAHEGCLPPFPADVFMIPQYGYLTLNDGSQAVGRSSFYCLEYFPSQMLRTGNNFQFSYEFENVPFHSSYAHSQSLDRLMNPLIDQYLYYLSKTINGSGQNQQTLKFSVAGPSNMAVQGRNYIPGPSYRQQRVSTTVTQNNNSEIAWPRASSWALNGRNSLMNPGPAMASHKEGEDRFFPLSGSLIFGKQGTGRDNVDADKVMITNEEEIKTTNPVATESYGQVATNHQSAQAQAQTGWVQNQGILPGMVWQDRDVYLQGPIWAKIPHTGGNFHPSPLMGGFGMKHPPPQILIKNTPVPADPPTAFNKDKLNSFITQYSTGQVSVEIEWELQKENSKRWNPEIQYTSNLYKSNNVEFAVNTGGVYSEPRPIGTRYLTRNL

SEQ ID NO: 990 - protein, 736 aa, synthetic construct
MAADGYLPDWLEDNLSEGIREWWALKPGAPQPKANQQHQDNARGLVLPGYKYLGPGNGLDKGEPVNAADAAALEHDKAYDQQLKAGDNPYLKYNHADAEFQERLKEDTSFGGNLGRAVFQAKKRLLEPLGLVEEAAKTAPGKKRPVEQSPQEPDSSAGIGKSGAQPAKKRLNFGQTGDTESVPDPQPIGEPPAAPSGVGSLTMASGGGAPVADNNEGADGVGSSSGNWHCDSQWLGDRVITTSTRTWALPTYNNHLYKQISNSTSGGSSNDNAYFGYSTPWGYFDFNRFHCHFSPRDWQRLINNNWGFRPKRLNFKLFNIQVKEVTDNNGVKTIANNLTSTVQVFADSDYQLPYVLGSAHEGCLPPFPADVFMIPQYGYLTLNDGSQAVGRSSFYCLEYFPSQMLRTGNNFQFSYEFENVPFHSSYAHSQSLDRLMNPLIDQYLYYLSKTINGSGQNQQTLKFSVAGPSNMAVQGRNYIPGPSYRQQRVSTTVTQNNNSEIAWPGASSWALNGRNSLMNPGPAMASHKEGEDRFFPLSGSLIFGKQGTGRDNVDADKVMITNEEEIKTTNPVATESYGQVATNHQSAQAQAQTGWVQNQGILPGMVWQDRDVYLQGPIWAKIPHTGGNFHPSPLMGGFGMKHPPPQILIKNTPVPADPPTAFNKDKLNSFITQYSTGQVSVEIEWELQKENSKRWNPEIQYTSNLCKSNNVEFAVNTGGVYSEPRPIGTRYLTRNL

SEQ ID NO: 991 - protein, 736 aa, synthetic construct
MAADGYLPDWLEDNLSEGIREWWALKPGAPQPKANQQHQDNARGLVLPGYKYLGPGNGLDKGEPVNAADAAALEHDKAYDQQLKAGDNPYLKYNHADAEFQERLKEDTSFGGNLGRAVFQAKKRLLEPLGLVEEAAKTAPGKKRPVEQSPQEPDSSAGIGKSGAQPAKKRLNFGQTGDTESVPDPQPIGEPPAAPSGVGSLTMASGGGAPVADNNEGADGVGSSSGNWHCDSQWLGDRVITTSTRTWALPTYNNHLYKQISNSTSGGSSNDNAYFGYSTPWGYFDFNRFHCHFSPRDWQRLINNNWGFRPKRLNFKLFNIQVKEVTDNNGVKTIANNLTSTVQVFADSDYQLPYVLGSAHEGCLPPFPADVFMIPQYGYLTLNDGSQAVGRSSFYCLEYFPSQMLRTGNNFQFSYEFENVPFHSSYAHSQSLDRLMNPLIDQYLYYLSKTINGSGQNQQTLKFSVAGPSNMAVQGRNYIPGPSYRQQRVSTTVTQNNNSEFAWPRASSWALNGRNSLMNPGPAMASHKEGEDRFFPLSGSLIFGKQGTGRDNVDADKVMITNEEEIKTTNPVATESYGQVATNHQSAQAQAQTGWVQNQGILPGMVWQDRDVYLQGPIWAKIPHTGGNFHPSPLMGGFGMKHPPPQILIKNTPVPADPPTAFNKDKLNSFITQYSTGQVSVEIEWELQKENSKRWNPEIQYTSNLCKSNNVEFAVNTGGVYSEPRPIGTRYLTRNL

SEQ ID NO: 992 - protein, 736 aa, synthetic construct
MAADGYLPDWLEDNLSEGIREWWALKPGAPQPKANQQHQDNARGLVLPGYKYLGPGNGLDKGEPVNAADAAALEHDKAYDQQLKAGDNPYLKYNHADAEFQERLKEDTSFGGNLGRAVFQAKKRLLEPLGLVEEAAKTAPGKKRPVEQSPQEPDSSAGIGKSGAQPAKKRLNFGQTGDTESVPDPQPIGEPPAAPSGVGSLTMASGGGAPVADNNEGADGVGSSSGNWHCDSQWLGDRVITTSTRTWALPTYNNHLYKQISNSTSGGSSNDNAYFGYSTPWGYFDFNRFHCHFSPRDWQRLINNNWGFRPKRLNFKLFNIQVKEVTDNNGVKTIANNLTSTVQVFADSDYQLPYVLGSAHEGCLPPFPADVFMIPQYGYLTLNDGSQAVGRSSFYCLEYFPSQMLRTGNNFQFSYEFENVPFHSSYAHSQSLDRLMNPLIDQYLYYLSKTINGSGQNQQTLKFSVAGPSNMAVQGRNYIPGPSYRQQRVSTTVTQNNNSEIAWPRASSWALNGRNSLMNPGPAMASHKEGEDRFFPLSGSLIFGKQGTGRDNVDADKVMITNEEEIKTTNPVATESYGQVATNHQSAQAQAQTGWVQNQGILPGMVWQDRDVYLQGPIWAKIPHTGGNFHPSPLMGGFGMKHPPPQILIKNTPVPADPPTAFNKDKLNSFITQYSTGQVSVEIEWELQKENSKRWNPEIQYTSNLCKSNNVEFAVNTGGVYSEPRPIGTRYLTRNL

SEQ ID NO: 993 - protein, 736 aa, synthetic construct
MAADGYLPDWLEDNLSEGIREWWALKPGAPQPKANQQHQDNARGLVLPGYKYLGPGNGLDKGEPVNAADAAALEHDKAYDQQLKAGDNPYLKYNHADAEFQERLKEDTSFGGNLGRAVFQAKKRLLEPLGLVEEAAKTAPGKKRPVEQSPQEPDSSAGIDKSGAQPAKKRLNFGQTGDTESVPDPQPIGEPPAAPSGVGSLTMASGGGAPVADNNEGADGVGSSSGNWHCDSQWLGDRVITTSTRTWALPTYNNHLYKQISNSTSGGSSNDNAYFGYSTPWGYFDFNRFHCHFSPRDWQRLINNNWGFRPKRLNFKLFNIQVKEVTDNNGVKTIANNLTSTVQVFGDSDYQLPYVLGSAHEGCLPPFPADVFMIPQYGYLTLNDGSQAVGRSSFYCLEYFPSQMLRTGNNFQFSYEFENVPFHSSYAHSQSLDRLMNPLIDQYLYYLSKTINGSGQNQQTLKFSVAGPSNMAVQGRNYIPGPSYRQQRVSTTVTQNNNSEFAWPGASSWALNGRNSLMNPGPAMASHKEGEDRFFPLSGSLIFGKQGTGRDNVDADKVMITNEEEIKTTNPVATESYGQVATNHQSAQAQAQTGWVQNQGILPGMVWQDRDVYLQGPIWAKIPHTDGNFHPSPLMGGFGMKHPPPQILIKNTPVPADPPTAFNKDKLNSFITQYSTGQVSVEIEWELQKENSKRWNPEIQYTSNYYKSNNVEFAVNTEGVYSEPRPIGTRYLTRNL

SEQ ID NO: 994 - protein, 736 aa, synthetic construct
MAADGYLPDWLEDNLSEGIREWWALKPGAPQPKANQQHQDNARGLVLPGYKYLGPGNGLDKGEPVNAADAAALEHDKAYDQQLKAGDNPYLKYNHADAEFQERLKEDTSFGGNLGRAVFQAKKRLLEPLGLVEEAAKTAPGKKRPVEQSPQEPDSSAGIDKSGAQPAKKRLNFGQTGDTESVPDPQPIGEPPAAPSGVGSLTMASGGGAPVADNNEGADGVGSSSGNWHCDSQWLGDRVITTSTRTWALPTYNNHLYKQISNSTSGGSSNDNAYFGYSTPWGYFDFNRFHCHFSPRDWQRLINNNWGFRPKRLNFKLFNIQVKEVTDNNGVKTIANNLTSTVQVFGDSDYQLPYVLGSAHEGCLPPFPADVFMIPQYGYLTLNDGSQAVGRSSFYCLEYFPSQMLRTGNNFQFSYEFENVPFHSSYAHSQSLDRLMNPLIDQYLYYLSKTINGSGQNQQTLKFSVAGPSNMAVQGRNYIPGPSYRQQRVSTTVTQNNNSEIAWPGASSWALNGRNSLMNPGPAMASHKEGEDRFFPLSGSLIFGKQGTGRDNVDADKVMITNEEEIKTTNPVATESYGQVATNHQSAQAQAQTGWVQNQGILPGMVWQDRDVYLQGPIWAKIPHTDGNFHPSPLMGGFGMKHPPPQILIKNTPVPADPPTAFNKDKLNSFITQYSTGQVSVEIEWELQKENSKRWNPEIQYTSNYYKSNNVEFAVNTEGVYSEPRPIGTRYLTRNL

SEQ ID NO: 995 - protein, 736 aa, synthetic construct
MAADGYLPDWLEDNLSEGIREWWALKPGAPQPKANQQHQDNARGLVLPGYKYLGPGNGLDKGEPVNAADAAALEHDKAYDQQLKAGDNPYLKYNHADAEFQERLKEDTSFGGNLGRAVFQAKKRLLEPLGLVEEAAKTAPGKKRPVEQSPQEPDSSAGIDKSGAQPAKKRLNFGQTGDTESVPDPQPIGEPPAAPSGVGSLTMASGGGAPVADNNEGADGVGSSSGNWHCDSQWLGDRVITTSTRTWALPTYNNHLYKQISNSTSGGSSNDNAYFGYSTPWGYFDFNRFHCHFSPRDWQRLINNNWGFRPKRLNFKLFNIQVKEVTDNNGVKTIANNLTSTVQVFGDSDYQLPYVLGSAHEGCLPPFPADVFMIPQYGYLTLNDGSQAVGRSSFYCLEYFPSQMLRTGNNFQFSYEFENVPFHSSYAHSQSLDRLMNPLIDQYLYYLSKTINGSGQNQQTLKFSVAGPSNMAVQGRNYIPGPSYRQQRVSTTVTQNNNSEFAWPRASSWALNGRNSLMNPGPAMASHKEGEDRFFPLSGSLIFGKQGTGRDNVDADKVMITNEEEIKTTNPVATESYGQVATNHQSAQAQAQTGWVQNQGILPGMVWQDRDVYLQGPIWAKIPHTDGNFHPSPLMGGFGMKHPPPQILIKNTPVPADPPTAFNKDKLNSFITQYSTGQVSVEIEWELQKENSKRWNPEIQYTSNYYKSNNVEFAVNTEGVYSEPRPIGTRYLTRNL

SEQ ID NO: 996 - protein, 736 aa, synthetic construct
MAADGYLPDWLEDNLSEGIREWWALKPGAPQPKANQQHQDNARGLVLPGYKYLGPGNGLDKGEPVNAADAAALEHDKAYDQQLKAGDNPYLKYNHADAEFQERLKEDTSFGGNLGRAVFQAKKRLLEPLGLVEEAAKTAPGKKRPVEQSPQEPDSSAGIDKSGAQPAKKRLNFGQTGDTESVPDPQPIGEPPAAPSGVGSLTMASGGGAPVADNNEGADGVGSSSGNWHCDSQWLGDRVITTSTRTWALPTYNNHLYKQISNSTSGGSSNDNAYFGYSTPWGYFDFNRFHCHFSPRDWQRLINNNWGFRPKRLNFKLFNIQVKEVTDNNGVKTIANNLTSTVQVFGDSDYQLPYVLGSAHEGCLPPFPADVFMIPQYGYLTLNDGSQAVGRSSFYCLEYFPSQMLRTGNNFQFSYEFENVPFHSSYAHSQSLDRLMNPLIDQYLYYLSKTINGSGQNQQTLKFSVAGPSNMAVQGRNYIPGPSYRQQRVSTTVTQNNNSEFAWPGASSWALNGRNSLMNPGPAMASHKEGEDRFFPLSGSLIFGKQGTGRDNVDADKVMITNEEEIKTTNPVATESYGQVATNHQSAQAQAQTGWVQNQGILPGMVWQDRDVYLQGPIWAKIPHTDGNFHPSPLMGGFGMKHPPPQILIKNTPVPADPPTAFNKDKLNSFITQYSTGQVSVEIEWELQKENSKRWNPEIQYTSNYCKSNNVEFAVNTEGVYSEPRPIGTRYLTRNL

SEQ ID NO: 997 - protein, 736 aa, synthetic construct
MAADGYLPDWLEDNLSEGIREWWALKPGAPQPKANQQHQDNARGLVLPGYKYLGPGNGLDKGEPVNAADAAALEHDKAYDQQLKAGDNPYLKYNHADAEFQERLKEDTSFGGNLGRAVFQAKKRLLEPLGLVEEAAKTAPGKKRPVEQSPQEPDSSAGIDKSGAQPAKKRLNFGQTGDTESVPDPQPIGEPPAAPSGVGSLTMASGGGAPVADNNEGADGVGSSSGNWHCDSQWLGDRVITTSTRTWALPTYNNHLYKQISNSTSGGSSNDNAYFGYSTPWGYFDFNRFHCHFSPRDWQRLINNNWGFRPKRLNFKLFNIQVKEVTDNNGVKTIANNLTSTVQVFGDSDYQLPYVLGSAHEGCLPPFPADVFMIPQYGYLTLNDGSQAVGRSSFYCLEYFPSQMLRTGNNFQFSYEFENVPFHSSYAHSQSLDRLMNPLIDQYLYYLSKTINGSGQNQQTLKFSVAGPSNMAVQGRNYIPGPSYRQQRVSTTVTQNNNSEIAWPRASSWALNGRNSLMNPGPAMASHKEGEDRFFPLSGSLIFGKQGTGRDNVDADKVMITNEEEIKTTNPVATESYGQVATNHQSAQAQAQTGWVQNQGILPGMVWQDRDVYLQGPIWAKIPHTDGNFHPSPLMGGFGMKHPPPQILIKNTPVPADPPTAFNKDKLNSFITQYSTGQVSVEIEWELQKENSKRWNPEIQYTSNYYKSNNVEFAVNTEGVYSEPRPIGTRYLTRNL

SEQ ID NO: 998 - protein, 736 aa, synthetic construct
MAADGYLPDWLEDNLSEGIREWWALKPGAPQPKANQQHQDNARGLVLPGYKYLGPGNGLDKGEPVNAADAAALEHDKAYDQQLKAGDNPYLKYNHADAEFQERLKEDTSFGGNLGRAVFQAKKRLLEPLGLVEEAAKTAPGKKRPVEQSPQEPDSSAGIDKSGAQPAKKRLNFGQTGDTESVPDPQPIGEPPAAPSGVGSLTMASGGGAPVADNNEGADGVGSSSGNWHCDSQWLGDRVITTSTRTWALPTYNNHLYKQISNSTSGGSSNDNAYFGYSTPWGYFDFNRFHCHFSPRDWQRLINNNWGFRPKRLNFKLFNIQVKEVTDNNGVKTIANNLTSTVQVFGDSDYQLPYVLGSAHEGCLPPFPADVFMIPQYGYLTLNDGSQAVGRSSFYCLEYFPSQMLRTGNNFQFSYEFENVPFHSSYAHSQSLDRLMNPLIDQYLYYLSKTINGSGQNQQTLKFSVAGPSNMAVQGRNYIPGPSYRQQRVSTTVTQNNNSEIAWPGASSWALNGRNSLMNPGPAMASHKEGEDRFFPLSGSLIFGKQGTGRDNVDADKVMITNEEEIKTTNPVATESYGQVATNHQSAQAQAQTGWVQNQGILPGMVWQDRDVYLQGPIWAKIPHTDGNFHPSPLMGGFGMKHPPPQILIKNTPVPADPPTAFNKDKLNSFITQYSTGQVSVEIEWELQKENSKRWNPEIQYTSNYCKSNNVEFAVNTEGVYSEPRPIGTRYLTRNL

SEQ ID NO: 999 - protein, 736 aa, synthetic construct
MAADGYLPDWLEDNLSEGIREWWALKPGAPQPKANQQHQDNARGLVLPGYKYLGPGNGLDKGEPVNAADAAALEHDKAYDQQLKAGDNPYLKYNHADAEFQERLKEDTSFGGNLGRAVFQAKKRLLEPLGLVEEAAKTAPGKKRPVEQSPQEPDSSAGIDKSGAQPAKKRLNFGQTGDTESVPDPQPIGEPPAAPSGVGSLTMASGGGAPVADNNEGADGVGSSSGNWHCDSQWLGDRVITTSTRTWALPTYNNHLYKQISNSTSGGSSNDNAYFGYSTPWGYFDFNRFHCHFSPRDWQRLINNNWGFRPKRLNFKLFNIQVKEVTDNNGVKTIANNLTSTVQVFGDSDYQLPYVLGSAHEGCLPPFPADVFMIPQYGYLTLNDGSQAVGRSSFYCLEYFPSQMLRTGNNFQFSYEFENVPFHSSYAHSQSLDRLMNPLIDQYLYYLSKTINGSGQNQQTLKFSVAGPSNMAVQGRNYIPGPSYRQQRVSTTVTQNNNSEFAWPRASSWALNGRNSLMNPGPAMASHKEGEDRFFPLSGSLIFGKQGTGRDNVDADKVMITNEEEIKTTNPVATESYGQVATNHQSAQAQAQTGWVQNQGILPGMVWQDRDVYLQGPIWAKIPHTDGNFHPSPLMGGFGMKHPPPQILIKNTPVPADPPTAFNKDKLNSFITQYSTGQVSVEIEWELQKENSKRWNPEIQYTSNYCKSNNVEFAVNTEGVYSEPRPIGTRYLTRNL

SEQ ID NO: 1000 - protein, 736 aa, synthetic construct
MAADGYLPDWLEDNLSEGIREWWALKPGAPQPKANQQHQDNARGLVLPGYKYLGPGNGLDKGEPVNAADAAALEHDKAYDQQLKAGDNPYLKYNHADAEFQERLKEDTSFGGNLGRAVFQAKKRLLEPLGLVEEAAKTAPGKKRPVEQSPQEPDSSAGIDKSGAQPAKKRLNFGQTGDTESVPDPQPIGEPPAAPSGVGSLTMASGGGAPVADNNEGADGVGSSSGNWHCDSQWLGDRVITTSTRTWALPTYNNHLYKQISNSTSGGSSNDNAYFGYSTPWGYFDFNRFHCHFSPRDWQRLINNNWGFRPKRLNFKLFNIQVKEVTDNNGVKTIANNLTSTVQVFGDSDYQLPYVLGSAHEGCLPPFPADVFMIPQYGYLTLNDGSQAVGRSSFYCLEYFPSQMLRTGNNFQFSYEFENVPFHSSYAHSQSLDRLMNPLIDQYLYYLSKTINGSGQNQQTLKFSVAGPSNMAVQGRNYIPGPSYRQQRVSTTVTQNNNSEIAWPRASSWALNGRNSLMNPGPAMASHKEGEDRFFPLSGSLIFGKQGTGRDNVDADKVMITNEEEIKTTNPVATESYGQVATNHQSAQAQAQTGWVQNQGILPGMVWQDRDVYLQGPIWAKIPHTDGNFHPSPLMGGFGMKHPPPQILIKNTPVPADPPTAFNKDKLNSFITQYSTGQVSVEIEWELQKENSKRWNPEIQYTSNYCKSNNVEFAVNTEGVYSEPRPIGTRYLTRNL

SEQ ID NO: 1001 - protein, 736 aa, synthetic construct
MAADGYLPDWLEDNLSEGIREWWALKPGAPQPKANQQHQDNARGLVLPGYKYLGPGNGLDKGEPVNAADAAALEHDKAYDQQLKAGDNPYLKYNHADAEFQERLKEDTSFGGNLGRAVFQAKKRLLEPLGLVEEAAKTAPGKKRPVEQSPQEPDSSAGIDKSGAQPAKKRLNFGQTGDTESVPDPQPIGEPPAAPSGVGSLTMASGGGAPVADNNEGADGVGSSSGNWHCDSQWLGDRVITTSTRTWALPTYNNHLYKQISNSTSGGSSNDNAYFGYSTPWGYFDFNRFHCHFSPRDWQRLINNNWGFRPKRLNFKLFNIQVKEVTDNNGVKTIANNLTSTVQVFTDSDYQLPYVLGSAHEGCLPPFPADVFMIPQYGYLTLNDGSQAVGRSSFYCLEYFPSQMLRTGNNFQFSYEFENVPFHSSYAHSQSLDRLMNPLIDQYLYYLSKTINGSGQNQQTLKFSVAGPSNMAVQGRNYIPGPSYRQQRVSTTVTQNNNSEFAWPGASSWALNGRNSLMNPGPAMASHKEGEDRFFPLSGSLIFGKQGTGRDNVDADKVMITNEEEIKTTNPVATESYGQVATNHQSAQAQAQTGWVQNQGILPGMVWQDRDVYLQGPIWAKIPHTDGNFHPSPLMGGFGMKHPPPQILIKNTPVPADPPTAFNKDKLNSFITQYSTGQVSVEIEWELQKENSKRWNPEIQYTSNLYKSNNVEFAVNTEGVYSEPRPIGTRYLTRNL

SEQ ID NO: 1002 - protein, 736 aa, synthetic construct
MAADGYLPDWLEDNLSEGIREWWALKPGAPQPKANQQHQDNARGLVLPGYKYLGPGNGLDKGEPVNAADAAALEHDKAYDQQLKAGDNPYLKYNHADAEFQERLKEDTSFGGNLGRAVFQAKKRLLEPLGLVEEAAKTAPGKKRPVEQSPQEPDSSAGIDKSGAQPAKKRLNFGQTGDTESVPDPQPIGEPPAAPSGVGSLTMASGGGAPVADNNEGADGVGSSSGNWHCDSQWLGDRVITTSTRTWALPTYNNHLYKQISNSTSGGSSNDNAYFGYSTPWGYFDFNRFHCHFSPRDWQRLINNNWGFRPKRLNFKLFNIQVKEVTDNNGVKTIANNLTSTVQVFTDSDYQLPYVLGSAHEGCLPPFPADVFMIPQYGYLTLNDGSQAVGRSSFYCLEYFPSQMLRTGNNFQFSYEFENVPFHSSYAHSQSLDRLMNPLIDQYLYYLSKTINGSGQNQQTLKFSVAGPSNMAVQGRNYIPGPSYRQQRVSTTVTQNNNSEIAWPGASSWALNGRNSLMNPGPAMASHKEGEDRFFPLSGSLIFGKQGTGRDNVDADKVMITNEEEIKTTNPVATESYGQVATNHQSAQAQAQTGWVQNQGILPGMVWQDRDVYLQGPIWAKIPHTDGNFHPSPLMGGFGMKHPPPQILIKNTPVPADPPTAFNKDKLNSFITQYSTGQVSVEIEWELQKENSKRWNPEIQYTSNLYKSNNVEFAVNTEGVYSEPRPIGTRYLTRNL

SEQ ID NO: 1003 - protein, 736 aa, synthetic construct
MAADGYLPDWLEDNLSEGIREWWALKPGAPQPKANQQHQDNARGLVLPGYKYLGPGNGLDKGEPVNAADAAALEHDKAYDQQLKAGDNPYLKYNHADAEFQERLKEDTSFGGNLGRAVFQAKKRLLEPLGLVEEAAKTAPGKKRPVEQSPQEPDSSAGIDKSGAQPAKKRLNFGQTGDTESVPDPQPIGEPPAAPSGVGSLTMASGGGAPVADNNEGADGVGSSSGNWHCDSQWLGDRVITTSTRTWALPTYNNHLYKQISNSTSGGSSNDNAYFGYSTPWGYFDFNRFHCHFSPRDWQRLINNNWGFRPKRLNFKLFNIQVKEVTDNNGVKTIANNLTSTVQVFTDSDYQLPYVLGSAHEGCLPPFPADVFMIPQYGYLTLNDGSQAVGRSSFYCLEYFPSQMLRTGNNFQFSYEFENVPFHSSYAHSQSLDRLMNPLIDQYLYYLSKTINGSGQNQQTLKFSVAGPSNMAVQGRNYIPGPSYRQQRVSTTVTQNNNSEFAWPRASSWALNGRNSLMNPGPAMASHKEGEDRFFPLSGSLIFGKQGTGRDNVDADKVMITNEEEIKTTNPVATESYGQVATNHQSAQAQAQTGWVQNQGILPGMVWQDRDVYLQGPIWAKIPHTDGNFHPSPLMGGFGMKHPPPQILIKNTPVPADPPTAFNKDKLNSFITQYSTGQVSVEIEWELQKENSKRWNPEIQYTSNLYKSNNVEFAVNTEGVYSEPRPIGTRYLTRNL

SEQ ID NO: 1004 - protein, 736 aa, synthetic construct
MAADGYLPDWLEDNLSEGIREWWALKPGAPQPKANQQHQDNARGLVLPGYKYLGPGNGLDKGEPVNAADAAALEHDKAYDQQLKAGDNPYLKYNHADAEFQERLKEDTSFGGNLGRAVFQAKKRLLEPLGLVEEAAKTAPGKKRPVEQSPQEPDSSAGIDKSGAQPAKKRLNFGQTGDTESVPDPQPIGEPPAAPSGVGSLTMASGGGAPVADNNEGADGVGSSSGNWHCDSQWLGDRVITTSTRTWALPTYNNHLYKQISNSTSGGSSNDNAYFGYSTPWGYFDFNRFHCHFSPRDWQRLINNNWGFRPKRLNFKLFNIQVKEVTDNNGVKTIANNLTSTVQVFTDSDYQLPYVLGSAHEGCLPPFPADVFMIPQYGYLTLNDGSQAVGRSSFYCLEYFPSQMLRTGNNFQFSYEFENVPFHSSYAHSQSLDRLMNPLIDQYLYYLSKTINGSGQNQQTLKFSVAGPSNMAVQGRNYIPGPSYRQQRVSTTVTQNNNSEFAWPGASSWALNGRNSLMNPGPAMASHKEGEDRFFPLSGSLIFGKQGTGRDNVDADKVMITNEEEIKTTNPVATESYGQVATNHQSAQAQAQTGWVQNQGILPGMVWQDRDVYLQGPIWAKIPHTDGNFHPSPLMGGFGMKHPPPQILIKNTPVPADPPTAFNKDKLNSFITQYSTGQVSVEIEWELQKENSKRWNPEIQYTSNLCKSNNVEFAVNTEGVYSEPRPIGTRYLTRNL

SEQ ID NO: 1005 - protein, 736 aa, synthetic construct
MAADGYLPDWLEDNLSEGIREWWALKPGAPQPKANQQHQDNARGLVLPGYKYLGPGNGLDKGEPVNAADAAALEHDKAYDQQLKAGDNPYLKYNHADAEFQERLKEDTSFGGNLGRAVFQAKKRLLEPLGLVEEAAKTAPGKKRPVEQSPQEPDSSAGIDKSGAQPAKKRLNFGQTGDTESVPDPQPIGEPPAAPSGVGSLTMASGGGAPVADNNEGADGVGSSSGNWHCDSQWLGDRVITTSTRTWALPTYNNHLYKQISNSTSGGSSNDNAYFGYSTPWGYFDFNRFHCHFSPRDWQRLINNNWGFRPKRLNFKLFNIQVKEVTDNNGVKTIANNLTSTVQVFTDSDYQLPYVLGSAHEGCLPPFPADVFMIPQYGYLTLNDGSQAVGRSSFYCLEYFPSQMLRTGNNFQFSYEFENVPFHSSYAHSQSLDRLMNPLIDQYLYYLSKTINGSGQNQQTLKFSVAGPSNMAVQGRNYIPGPSYRQQRVSTTVTQNNNSEIAWPRASSWALNGRNSLMNPGPAMASHKEGEDRFFPLSGSLIFGKQGTGRDNVDADKVMITNEEEIKTTNPVATESYGQVATNHQSAQAQAQTGWVQNQGILPGMVWQDRDVYLQGPIWAKIPHTDGNFHPSPLMGGFGMKHPPPQILIKNTPVPADPPTAFNKDKLNSFITQYSTGQVSVEIEWELQKENSKRWNPEIQYTSNLYKSNNVEFAVNTEGVYSEPRPIGTRYLTRNL

SEQ ID NO: 1006 - protein, 736 aa, synthetic construct
MAADGYLPDWLEDNLSEGIREWWALKPGAPQPKANQQHQDNARGLVLPGYKYLGPGNGLDKGEPVNAADAAALEHDKAYDQQLKAGDNPYLKYNHADAEFQERLKEDTSFGGNLGRAVFQAKKRLLEPLGLVEEAAKTAPGKKRPVEQSPQEPDSSAGIDKSGAQPAKKRLNFGQTGDTESVPDPQPIGEPPAAPSGVGSLTMASGGGAPVADNNEGADGVGSSSGNWHCDSQWLGDRVITTSTRTWALPTYNNHLYKQISNSTSGGSSNDNAYFGYSTPWGYFDFNRFHCHFSPRDWQRLINNNWGFRPKRLNFKLFNIQVKEVTDNNGVKTIANNLTSTVQVFTDSDYQLPYVLGSAHEGCLPPFPADVFMIPQYGYLTLNDGSQAVGRSSFYCLEYFPSQMLRTGNNFQFSYEFENVPFHSSYAHSQSLDRLMNPLIDQYLYYLSKTINGSGQNQQTLKFSVAGPSNMAVQGRNYIPGPSYRQQRVSTTVTQNNNSEIAWPGASSWALNGRNSLMNPGPAMASHKEGEDRFFPLSGSLIFGKQGTGRDNVDADKVMITNEEEIKTTNPVATESYGQVATNHQSAQAQAQTGWVQNQGILPGMVWQDRDVYLQGPIWAKIPHTDGNFHPSPLMGGFGMKHPPPQILIKNTPVPADPPTAFNKDKLNSFITQYSTGQVSVEIEWELQKENSKRWNPEIQYTSNLCKSNNVEFAVNTEGVYSEPRPIGTRYLTRNL

SEQ ID NO: 1007 - protein, 736 aa, synthetic construct
MAADGYLPDWLEDNLSEGIREWWALKPGAPQPKANQQHQDNARGLVLPGYKYLGPGNGLDKGEPVNAADAAALEHDKAYDQQLKAGDNPYLKYNHADAEFQERLKEDTSFGGNLGRAVFQAKKRLLEPLGLVEEAAKTAPGKKRPVEQSPQEPDSSAGIDKSGAQPAKKRLNFGQTGDTESVPDPQPIGEPPAAPSGVGSLTMASGGGAPVADNNEGADGVGSSSGNWHCDSQWLGDRVITTSTRTWALPTYNNHLYKQISNSTSGGSSNDNAYFGYSTPWGYFDFNRFHCHFSPRDWQRLINNNWGFRPKRLNFKLFNIQVKEVTDNNGVKTIANNLTSTVQVFTDSDYQLPYVLGSAHEGCLPPFPADVFMIPQYGYLTLNDGSQAVGRSSFYCLEYFPSQMLRTGNNFQFSYEFENVPFHSSYAHSQSLDRLMNPLIDQYLYYLSKTINGSGQNQQTLKFSVAGPSNMAVQGRNYIPGPSYRQQRVSTTVTQNNNSEFAWPRASSWALNGRNSLMNPGPAMASHKEGEDRFFPLSGSLIFGKQGTGRDNVDADKVMITNEEEIKTTNPVATESYGQVATNHQSAQAQAQTGWVQNQGILPGMVWQDRDVYLQGPIWAKIPHTDGNFHPSPLMGGFGMKHPPPQILIKNTPVPADPPTAFNKDKLNSFITQYSTGQVSVEIEWELQKENSKRWNPEIQYTSNLCKSNNVEFAVNTEGVYSEPRPIGTRYLTRNL

SEQ ID NO: 1008 - protein, 736 aa, synthetic construct
MAADGYLPDWLEDNLSEGIREWWALKPGAPQPKANQQHQDNARGLVLPGYKYLGPGNGLDKGEPVNAADAAALEHDKAYDQQLKAGDNPYLKYNHADAEFQERLKEDTSFGGNLGRAVFQAKKRLLEPLGLVEEAAKTAPGKKRPVEQSPQEPDSSAGIDKSGAQPAKKRLNFGQTGDTESVPDPQPIGEPPAAPSGVGSLTMASGGGAPVADNNEGADGVGSSSGNWHCDSQWLGDRVITTSTRTWALPTYNNHLYKQISNSTSGGSSNDNAYFGYSTPWGYFDFNRFHCHFSPRDWQRLINNNWGFRPKRLNFKLFNIQVKEVTDNNGVKTIANNLTSTVQVFTDSDYQLPYVLGSAHEGCLPPFPADVFMIPQYGYLTLNDGSQAVGRSSFYCLEYFPSQMLRTGNNFQFSYEFENVPFHSSYAHSQSLDRLMNPLIDQYLYYLSKTINGSGQNQQTLKFSVAGPSNMAVQGRNYIPGPSYRQQRVSTTVTQNNNSEIAWPRASSWALNGRNSLMNPGPAMASHKEGEDRFFPLSGSLIFGKQGTGRDNVDADKVMITNEEEIKTTNPVATESYGQVATNHQSAQAQAQTGWVQNQGILPGMVWQDRDVYLQGPIWAKIPHTDGNFHPSPLMGGFGMKHPPPQILIKNTPVPADPPTAFNKDKLNSFITQYSTGQVSVEIEWELQKENSKRWNPEIQYTSNLCKSNNVEFAVNTEGVYSEPRPIGTRYLTRNL

SEQ ID NO: 1009 - protein, 736 aa, synthetic construct
MAADGYLPDWLEDNLSEGIREWWALKPGAPQPKANQQHQDNARGLVLPGYKYLGPGNGLDKGEPVNAADAAALEHDKAYDQQLKAGDNPYLKYNHADAEFQERLKEDTSFGGNLGRAVFQAKKRLLEPLGLVEEAAKTAPGKKRPVEQSPQEPDSSAGIDKSGAQPAKKRLNFGQTGDTESVPDPQPIGEPPAAPSGVGSLTMASGGGAPVADNNEGADGVGSSSGNWHCDSQWLGDRVITTSTRTWALPTYNNHLYKQISNSTSGGSSNDNAYFGYSTPWGYFDFNRFHCHFSPRDWQRLINNNWGFRPKRLNFKLFNIQVKEVTDNNGVKTIANNLTSTVQVFGDSDYQLPYVLGSAHEGCLPPFPADVFMIPQYGYLTLNDGSQAVGRSSFYCLEYFPSQMLRTGNNFQFSYEFENVPFHSSYAHSQSLDRLMNPLIDQYLYYLSKTINGSGQNQQTLKFSVAGPSNMAVQGRNYIPGPSYRQQRVSTTVTQNNNSEFAWPGASSWALNGRNSLMNPGPAMASHKEGEDRFFPLSGSLIFGKQGTGRDNVDADKVMITNEEEIKTTNPVATESYGQVATNHQSAQAQAQTGWVQNQGILPGMVWQDRDVYLQGPIWAKIPHTDGNFHPSPLMGGFGMKHPPPQILIKNTPVPADPPTAFNKDKLNSFITQYSTGQVSVEIEWELQKENSKRWNPEIQYTSNLYKSNNVEFAVNTEGVYSEPRPIGTRYLTRNL

SEQ ID NO: 1010 - protein, 736 aa, synthetic construct
MAADGYLPDWLEDNLSEGIREWWALKPGAPQPKANQQHQDNARGLVLPGYKYLGPGNGLDKGEPVNAADAAALEHDKAYDQQLKAGDNPYLKYNHADAEFQERLKEDTSFGGNLGRAVFQAKKRLLEPLGLVEEAAKTAPGKKRPVEQSPQEPDSSAGIDKSGAQPAKKRLNFGQTGDTESVPDPQPIGEPPAAPSGVGSLTMASGGGAPVADNNEGADGVGSSSGNWHCDSQWLGDRVITTSTRTWALPTYNNHLYKQISNSTSGGSSNDNAYFGYSTPWGYFDFNRFHCHFSPRDWQRLINNNWGFRPKRLNFKLFNIQVKEVTDNNGVKTIANNLTSTVQVFGDSDYQLPYVLGSAHEGCLPPFPADVFMIPQYGYLTLNDGSQAVGRSSFYCLEYFPSQMLRTGNNFQFSYEFENVPFHSSYAHSQSLDRLMNPLIDQYLYYLSKTINGSGQNQQTLKFSVAGPSNMAVQGRNYIPGPSYRQQRVSTTVTQNNNSEIAWPGASSWALNGRNSLMNPGPAMASHKEGEDRFFPLSGSLIFGKQGTGRDNVDADKVMITNEEEIKTTNPVATESYGQVATNHQSAQAQAQTGWVQNQGILPGMVWQDRDVYLQGPIWAKIPHTDGNFHPSPLMGGFGMKHPPPQILIKNTPVPADPPTAFNKDKLNSFITQYSTGQVSVEIEWELQKENSKRWNPEIQYTSNLYKSNNVEFAVNTEGVYSEPRPIGTRYLTRNL

SEQ ID NO: 1011 - protein, 736 aa, synthetic construct
MAADGYLPDWLEDNLSEGIREWWALKPGAPQPKANQQHQDNARGLVLPGYKYLGPGNGLDKGEPVNAADAAALEHDKAYDQQLKAGDNPYLKYNHADAEFQERLKEDTSFGGNLGRAVFQAKKRLLEPLGLVEEAAKTAPGKKRPVEQSPQEPDSSAGIDKSGAQPAKKRLNFGQTGDTESVPDPQPIGEPPAAPSGVGSLTMASGGGAPVADNNEGADGVGSSSGNWHCDSQWLGDRVITTSTRTWALPTYNNHLYKQISNSTSGGSSNDNAYFGYSTPWGYFDFNRFHCHFSPRDWQRLINNNWGFRPKRLNFKLFNIQVKEVTDNNGVKTIANNLTSTVQVFGDSDYQLPYVLGSAHEGCLPPFPADVFMIPQYGYLTLNDGSQAVGRSSFYCLEYFPSQMLRTGNNFQFSYEFENVPFHSSYAHSQSLDRLMNPLIDQYLYYLSKTINGSGQNQQTLKFSVAGPSNMAVQGRNYIPGPSYRQQRVSTTVTQNNNSEFAWPRASSWALNGRNSLMNPGPAMASHKEGEDRFFPLSGSLIFGKQGTGRDNVDADKVMITNEEEIKTTNPVATESYGQVATNHQSAQAQAQTGWVQNQGILPGMVWQDRDVYLQGPIWAKIPHTDGNFHPSPLMGGFGMKHPPPQILIKNTPVPADPPTAFNKDKLNSFITQYSTGQVSVEIEWELQKENSKRWNPEIQYTSNLYKSNNVEFAVNTEGVYSEPRPIGTRYLTRNL

SEQ ID NO: 1012 - protein, 736 aa, synthetic construct
MAADGYLPDWLEDNLSEGIREWWALKPGAPQPKANQQHQDNARGLVLPGYKYLGPGNGLDKGEPVNAADAAALEHDKAYDQQLKAGDNPYLKYNHADAEFQERLKEDTSFGGNLGRAVFQAKKRLLEPLGLVEEAAKTAPGKKRPVEQSPQEPDSSAGIDKSGAQPAKKRLNFGQTGDTESVPDPQPIGEPPAAPSGVGSLTMASGGGAPVADNNEGADGVGSSSGNWHCDSQWLGDRVITTSTRTWALPTYNNHLYKQISNSTSGGSSNDNAYFGYSTPWGYFDFNRFHCHFSPRDWQRLINNNWGFRPKRLNFKLFNIQVKEVTDNNGVKTIANNLTSTVQVFGDSDYQLPYVLGSAHEGCLPPFPADVFMIPQYGYLTLNDGSQAVGRSSFYCLEYFPSQMLRTGNNFQFSYEFENVPFHSSYAHSQSLDRLMNPLIDQYLYYLSKTINGSGQNQQTLKFSVAGPSNMAVQGRNYIPGPSYRQQRVSTTVTQNNNSEFAWPGASSWALNGRNSLMNPGPAMASHKEGEDRFFPLSGSLIFGKQGTGRDNVDADKVMITNEEEIKTTNPVATESYGQVATNHQSAQAQAQTGWVQNQGILPGMVWQDRDVYLQGPIWAKIPHTDGNFHPSPLMGGFGMKHPPPQILIKNTPVPADPPTAFNKDKLNSFITQYSTGQVSVEIEWELQKENSKRWNPEIQYTSNLCKSNNVEFAVNTEGVYSEPRPIGTRYLTRNL

SEQ ID NO: 1013 - protein, 736 aa, synthetic construct
MAADGYLPDWLEDNLSEGIREWWALKPGAPQPKANQQHQDNARGLVLPGYKYLGPGNGLDKGEPVNAADAAALEHDKAYDQQLKAGDNPYLKYNHADAEFQERLKEDTSFGGNLGRAVFQAKKRLLEPLGLVEEAAKTAPGKKRPVEQSPQEPDSSAGIDKSGAQPAKKRLNFGQTGDTESVPDPQPIGEPPAAPSGVGSLTMASGGGAPVADNNEGADGVGSSSGNWHCDSQWLGDRVITTSTRTWALPTYNNHLYKQISNSTSGGSSNDNAYFGYSTPWGYFDFNRFHCHFSPRDWQRLINNNWGFRPKRLNFKLFNIQVKEVTDNNGVKTIANNLTSTVQVFGDSDYQLPYVLGSAHEGCLPPFPADVFMIPQYGYLTLNDGSQAVGRSSFYCLEYFPSQMLRTGNNFQFSYEFENVPFHSSYAHSQSLDRLMNPLIDQYLYYLSKTINGSGQNQQTLKFSVAGPSNMAVQGRNYIPGPSYRQQRVSTTVTQNNNSEIAWPRASSWALNGRNSLMNPGPAMASHKEGEDRFFPLSGSLIFGKQGTGRDNVDADKVMITNEEEIKTTNPVATESYGQVATNHQSAQAQAQTGWVQNQGILPGMVWQDRDVYLQGPIWAKIPHTDGNFHPSPLMGGFGMKHPPPQILIKNTPVPADPPTAFNKDKLNSFITQYSTGQVSVEIEWELQKENSKRWNPEIQYTSNLYKSNNVEFAVNTEGVYSEPRPIGTRYLTRNL

SEQ ID NO: 1014 - protein, 736 aa, synthetic construct
MAADGYLPDWLEDNLSEGIREWWALKPGAPQPKANQQHQDNARGLVLPGYKYLGPGNGLDKGEPVNAADAAALEHDKAYDQQLKAGDNPYLKYNHADAEFQERLKEDTSFGGNLGRAVFQAKKRLLEPLGLVEEAAKTAPGKKRPVEQSPQEPDSSAGIDKSGAQPAKKRLNFGQTGDTESVPDPQPIGEPPAAPSGVGSLTMASGGGAPVADNNEGADGVGSSSGNWHCDSQWLGDRVITTSTRTWALPTYNNHLYKQISNSTSGGSSNDNAYFGYSTPWGYFDFNRFHCHFSPRDWQRLINNNWGFRPKRLNFKLFNIQVKEVTDNNGVKTIANNLTSTVQVFGDSDYQLPYVLGSAHEGCLPPFPADVFMIPQYGYLTLNDGSQAVGRSSFYCLEYFPSQMLRTGNNFQFSYEFENVPFHSSYAHSQSLDRLMNPLIDQYLYYLSKTINGSGQNQQTLKFSVAGPSNMAVQGRNYIPGPSYRQQRVSTTVTQNNNSEIAWPGASSWALNGRNSLMNPGPAMASHKEGEDRFFPLSGSLIFGKQGTGRDNVDADKVMITNEEEIKTTNPVATESYGQVATNHQSAQAQAQTGWVQNQGILPGMVWQDRDVYLQGPIWAKIPHTDGNFHPSPLMGGFGMKHPPPQILIKNTPVPADPPTAFNKDKLNSFITQYSTGQVSVEIEWELQKENSKRWNPEIQYTSNLCKSNNVEFAVNTEGVYSEPRPIGTRYLTRNL

SEQ ID NO: 1015 - protein, 736 aa, synthetic construct
MAADGYLPDWLEDNLSEGIREWWALKPGAPQPKANQQHQDNARGLVLPGYKYLGPGNGLDKGEPVNAADAAALEHDKAYDQQLKAGDNPYLKYNHADAEFQERLKEDTSFGGNLGRAVFQAKKRLLEPLGLVEEAAKTAPGKKRPVEQSPQEPDSSAGIDKSGAQPAKKRLNFGQTGDTESVPDPQPIGEPPAAPSGVGSLTMASGGGAPVADNNEGADGVGSSSGNWHCDSQWLGDRVITTSTRTWALPTYNNHLYKQISNSTSGGSSNDNAYFGYSTPWGYFDFNRFHCHFSPRDWQRLINNNWGFRPKRLNFKLFNIQVKEVTDNNGVKTIANNLTSTVQVFGDSDYQLPYVLGSAHEGCLPPFPADVFMIPQYGYLTLNDGSQAVGRSSFYCLEYFPSQMLRTGNNFQFSYEFENVPFHSSYAHSQSLDRLMNPLIDQYLYYLSKTINGSGQNQQTLKFSVAGPSNMAVQGRNYIPGPSYRQQRVSTTVTQNNNSEFAWPRASSWALNGRNSLMNPGPAMASHKEGEDRFFPLSGSLIFGKQGTGRDNVDADKVMITNEEEIKTTNPVATESYGQVATNHQSAQAQAQTGWVQNQGILPGMVWQDRDVYLQGPIWAKIPHTDGNFHPSPLMGGFGMKHPPPQILIKNTPVPADPPTAFNKDKLNSFITQYSTGQVSVEIEWELQKENSKRWNPEIQYTSNLCKSNNVEFAVNTEGVYSEPRPIGTRYLTRNL

SEQ ID NO: 1016 - protein, 736 aa, synthetic construct
MAADGYLPDWLEDNLSEGIREWWALKPGAPQPKANQQHQDNARGLVLPGYKYLGPGNGLDKGEPVNAADAAALEHDKAYDQQLKAGDNPYLKYNHADAEFQERLKEDTSFGGNLGRAVFQAKKRLLEPLGLVEEAAKTAPGKKRPVEQSPQEPDSSAGIDKSGAQPAKKRLNFGQTGDTESVPDPQPIGEPPAAPSGVGSLTMASGGGAPVADNNEGADGVGSSSGNWHCDSQWLGDRVITTSTRTWALPTYNNHLYKQISNSTSGGSSNDNAYFGYSTPWGYFDFNRFHCHFSPRDWQRLINNNWGFRPKRLNFKLFNIQVKEVTDNNGVKTIANNLTSTVQVFGDSDYQLPYVLGSAHEGCLPPFPADVFMIPQYGYLTLNDGSQAVGRSSFYCLEYFPSQMLRTGNNFQFSYEFENVPFHSSYAHSQSLDRLMNPLIDQYLYYLSKTINGSGQNQQTLKFSVAGPSNMAVQGRNYIPGPSYRQQRVSTTVTQNNNSEIAWPRASSWALNGRNSLMNPGPAMASHKEGEDRFFPLSGSLIFGKQGTGRDNVDADKVMITNEEEIKTTNPVATESYGQVATNHQSAQAQAQTGWVQNQGILPGMVWQDRDVYLQGPIWAKIPHTDGNFHPSPLMGGFGMKHPPPQILIKNTPVPADPPTAFNKDKLNSFITQYSTGQVSVEIEWELQKENSKRWNPEIQYTSNLCKSNNVEFAVNTEGVYSEPRPIGTRYLTRNL

SEQ ID NO: 1017 - protein, 736 aa, synthetic construct
MAADGYLPDWLEDNLSEGIREWWALKPGAPQPKANQQHQDNARGLVLPGYKYLGPGNGLDKGEPVNAADAAALEHDKAYDQQLKAGDNPYLKYNHADAEFQERLKEDTSFGGNLGRAVFQAKKRLLEPLGLVEEAAKTAPGKKRPVEQSPQEPDSSAGIDKSGAQPAKKRLNFGQTGDTESVPDPQPIGEPPAAPSGVGSLTMASGGGAPVADNNEGADGVGSSSGNWHCDSQWLGDRVITTSTRTWALPTYNNHLYKQISNSTSGGSSNDNAYFGYSTPWGYFDFNRFHCHFSPRDWQRLINNNWGFRPKRLNFKLFNIQVKEVTDNNGVKTIANNLTSTVQVFADSDYQLPYVLGSAHEGCLPPFPADVFMIPQYGYLTLNDGSQAVGRSSFYCLEYFPSQMLRTGNNFQFSYEFENVPFHSSYAHSQSLDRLMNPLIDQYLYYLSKTINGSGQNQQTLKFSVAGPSNMAVQGRNYIPGPSYRQQRVSTTVTQNNNSEFAWPGASSWALNGRNSLMNPGPAMASHKEGEDRFFPLSGSLIFGKQGTGRDNVDADKVMITNEEEIKTTNPVATESYGQVATNHQSAQAQAQTGWVQNQGILPGMVWQDRDVYLQGPIWAKIPHTDGNFHPSPLMGGFGMKHPPPQILIKNTPVPADPPTAFNKDKLNSFITQYSTGQVSVEIEWELQKENSKRWNPEIQYTSNLYKSNNVEFAVNTEGVYSEPRPIGTRYLTRNL

SEQ ID NO: 1018 - protein, 736 aa, synthetic construct
MAADGYLPDWLEDNLSEGIREWWALKPGAPQPKANQQHQDNARGLVLPGYKYLGPGNGLDKGEPVNAADAAALEHDKAYDQQLKAGDNPYLKYNHADAEFQERLKEDTSFGGNLGRAVFQAKKRLLEPLGLVEEAAKTAPGKKRPVEQSPQEPDSSAGIDKSGAQPAKKRLNFGQTGDTESVPDPQPIGEPPAAPSGVGSLTMASGGGAPVADNNEGADGVGSSSGNWHCDSQWLGDRVITTSTRTWALPTYNNHLYKQISNSTSGGSSNDNAYFGYSTPWGYFDFNRFHCHFSPRDWQRLINNNWGFRPKRLNFKLFNIQVKEVTDNNGVKTIANNLTSTVQVFADSDYQLPYVLGSAHEGCLPPFPADVFMIPQYGYLTLNDGSQAVGRSSFYCLEYFPSQMLRTGNNFQFSYEFENVPFHSSYAHSQSLDRLMNPLIDQYLYYLSKTINGSGQNQQTLKFSVAGPSNMAVQGRNYIPGPSYRQQRVSTTVTQNNNSEIAWPGASSWALNGRNSLMNPGPAMASHKEGEDRFFPLSGSLIFGKQGTGRDNVDADKVMITNEEEIKTTNPVATESYGQVATNHQSAQAQAQTGWVQNQGILPGMVWQDRDVYLQGPIWAKIPHTDGNFHPSPLMGGFGMKHPPPQILIKNTPVPADPPTAFNKDKLNSFITQYSTGQVSVEIEWELQKENSKRWNPEIQYTSNLYKSNNVEFAVNTEGVYSEPRPIGTRYLTRNL

SEQ ID NO: 1019 - protein, 736 aa, synthetic construct
MAADGYLPDWLEDNLSEGIREWWALKPGAPQPKANQQHQDNARGLVLPGYKYLGPGNGLDKGEPVNAADAAALEHDKAYDQQLKAGDNPYLKYNHADAEFQERLKEDTSFGGNLGRAVFQAKKRLLEPLGLVEEAAKTAPGKKRPVEQSPQEPDSSAGIDKSGAQPAKKRLNFGQTGDTESVPDPQPIGEPPAAPSGVGSLTMASGGGAPVADNNEGADGVGSSSGNWHCDSQWLGDRVITTSTRTWALPTYNNHLYKQISNSTSGGSSNDNAYFGYSTPWGYFDFNRFHCHFSPRDWQRLINNNWGFRPKRLNFKLFNIQVKEVTDNNGVKTIANNLTSTVQVFADSDYQLPYVLGSAHEGCLPPFPADVFMIPQYGYLTLNDGSQAVGRSSFYCLEYFPSQMLRTGNNFQFSYEFENVPFHSSYAHSQSLDRLMNPLIDQYLYYLSKTINGSGQNQQTLKFSVAGPSNMAVQGRNYIPGPSYRQQRVSTTVTQNNNSEFAWPRASSWALNGRNSLMNPGPAMASHKEGEDRFFPLSGSLIFGKQGTGRDNVDADKVMITNEEEIKTTNPVATESYGQVATNHQSAQAQAQTGWVQNQGILPGMVWQDRDVYLQGPIWAKIPHTDGNFHPSPLMGGFGMKHPPPQILIKNTPVPADPPTAFNKDKLNSFITQYSTGQVSVEIEWELQKENSKRWNPEIQYTSNLYKSNNVEFAVNTEGVYSEPRPIGTRYLTRNL

SEQ ID NO: 1020 - protein, 736 aa, synthetic construct
MAADGYLPDWLEDNLSEGIREWWALKPGAPQPKANQQHQDNARGLVLPGYKYLGPGNGLDKGEPVNAADAAALEHDKAYDQQLKAGDNPYLKYNHADAEFQERLKEDTSFGGNLGRAVFQAKKRLLEPLGLVEEAAKTAPGKKRPVEQSPQEPDSSAGIDKSGAQPAKKRLNFGQTGDTESVPDPQPIGEPPAAPSGVGSLTMASGGGAPVADNNEGADGVGSSSGNWHCDSQWLGDRVITTSTRTWALPTYNNHLYKQISNSTSGGSSNDNAYFGYSTPWGYFDFNRFHCHFSPRDWQRLINNNWGFRPKRLNFKLFNIQVKEVTDNNGVKTIANNLTSTVQVFADSDYQLPYVLGSAHEGCLPPFPADVFMIPQYGYLTLNDGSQAVGRSSFYCLEYFPSQMLRTGNNFQFSYEFENVPFHSSYAHSQSLDRLMNPLIDQYLYYLSKTINGSGQNQQTLKFSVAGPSNMAVQGRNYIPGPSYRQQRVSTTVTQNNNSEFAWPGASSWALNGRNSLMNPGPAMASHKEGEDRFFPLSGSLIFGKQGTGRDNVDADKVMITNEEEIKTTNPVATESYGQVATNHQSAQAQAQTGWVQNQGILPGMVWQDRDVYLQGPIWAKIPHTDGNFHPSPLMGGFGMKHPPPQILIKNTPVPADPPTAFNKDKLNSFITQYSTGQVSVEIEWELQKENSKRWNPEIQYTSNLCKSNNVEFAVNTEGVYSEPRPIGTRYLTRNL

SEQ ID NO: 1021 - protein, 736 aa, synthetic construct
MAADGYLPDWLEDNLSEGIREWWALKPGAPQPKANQQHQDNARGLVLPGYKYLGPGNGLDKGEPVNAADAAALEHDKAYDQQLKAGDNPYLKYNHADAEFQERLKEDTSFGGNLGRAVFQAKKRLLEPLGLVEEAAKTAPGKKRPVEQSPQEPDSSAGIDKSGAQPAKKRLNFGQTGDTESVPDPQPIGEPPAAPSGVGSLTMASGGGAPVADNNEGADGVGSSSGNWHCDSQWLGDRVITTSTRTWALPTYNNHLYKQISNSTSGGSSNDNAYFGYSTPWGYFDFNRFHCHFSPRDWQRLINNNWGFRPKRLNFKLFNIQVKEVTDNNGVKTIANNLTSTVQVFADSDYQLPYVLGSAHEGCLPPFPADVFMIPQYGYLTLNDGSQAVGRSSFYCLEYFPSQMLRTGNNFQFSYEFENVPFHSSYAHSQSLDRLMNPLIDQYLYYLSKTINGSGQNQQTLKFSVAGPSNMAVQGRNYIPGPSYRQQRVSTTVTQNNNSEIAWPRASSWALNGRNSLMNPGPAMASHKEGEDRFFPLSGSLIFGKQGTGRDNVDADKVMITNEEEIKTTNPVATESYGQVATNHQSAQAQAQTGWVQNQGILPGMVWQDRDVYLQGPIWAKIPHTDGNFHPSPLMGGFGMKHPPPQILIKNTPVPADPPTAFNKDKLNSFITQYSTGQVSVEIEWELQKENSKRWNPEIQYTSNLYKSNNVEFAVNTEGVYSEPRPIGTRYLTRNL

SEQ ID NO: 1022 - protein, 736 aa, synthetic construct
MAADGYLPDWLEDNLSEGIREWWALKPGAPQPKANQQHQDNARGLVLPGYKYLGPGNGLDKGEPVNAADAAALEHDKAYDQQLKAGDNPYLKYNHADAEFQERLKEDTSFGGNLGRAVFQAKKRLLEPLGLVEEAAKTAPGKKRPVEQSPQEPDSSAGIDKSGAQPAKKRLNFGQTGDTESVPDPQPIGEPPAAPSGVGSLTMASGGGAPVADNNEGADGVGSSSGNWHCDSQWLGDRVITTSTRTWALPTYNNHLYKQISNSTSGGSSNDNAYFGYSTPWGYFDFNRFHCHFSPRDWQRLINNNWGFRPKRLNFKLFNIQVKEVTDNNGVKTIANNLTSTVQVFADSDYQLPYVLGSAHEGCLPPFPADVFMIPQYGYLTLNDGSQAVGRSSFYCLEYFPSQMLRTGNNFQFSYEFENVPFHSSYAHSQSLDRLMNPLIDQYLYYLSKTINGSGQNQQTLKFSVAGPSNMAVQGRNYIPGPSYRQQRVSTTVTQNNNSEIAWPGASSWALNGRNSLMNPGPAMASHKEGEDRFFPLSGSLIFGKQGTGRDNVDADKVMITNEEEIKTTNPVATESYGQVATNHQSAQAQAQTGWVQNQGILPGMVWQDRDVYLQGPIWAKIPHTDGNFHPSPLMGGFGMKHPPPQILIKNTPVPADPPTAFNKDKLNSFITQYSTGQVSVEIEWELQKENSKRWNPEIQYTSNLCKSNNVEFAVNTEGVYSEPRPIGTRYLTRNL

SEQ ID NO: 1023 - protein, 736 aa, synthetic construct
MAADGYLPDWLEDNLSEGIREWWALKPGAPQPKANQQHQDNARGLVLPGYKYLGPGNGLDKGEPVNAADAAALEHDKAYDQQLKAGDNPYLKYNHADAEFQERLKEDTSFGGNLGRAVFQAKKRLLEPLGLVEEAAKTAPGKKRPVEQSPQEPDSSAGIDKSGAQPAKKRLNFGQTGDTESVPDPQPIGEPPAAPSGVGSLTMASGGGAPVADNNEGADGVGSSSGNWHCDSQWLGDRVITTSTRTWALPTYNNHLYKQISNSTSGGSSNDNAYFGYSTPWGYFDFNRFHCHFSPRDWQRLINNNWGFRPKRLNFKLFNIQVKEVTDNNGVKTIANNLTSTVQVFADSDYQLPYVLGSAHEGCLPPFPADVFMIPQYGYLTLNDGSQAVGRSSFYCLEYFPSQMLRTGNNFQFSYEFENVPFHSSYAHSQSLDRLMNPLIDQYLYYLSKTINGSGQNQQTLKFSVAGPSNMAVQGRNYIPGPSYRQQRVSTTVTQNNNSEFAWPRASSWALNGRNSLMNPGPAMASHKEGEDRFFPLSGSLIFGKQGTGRDNVDADKVMITNEEEIKTTNPVATESYGQVATNHQSAQAQAQTGWVQNQGILPGMVWQDRDVYLQGPIWAKIPHTDGNFHPSPLMGGFGMKHPPPQILIKNTPVPADPPTAFNKDKLNSFITQYSTGQVSVEIEWELQKENSKRWNPEIQYTSNLCKSNNVEFAVNTEGVYSEPRPIGTRYLTRNL

SEQ ID NO: 1024 - protein, 736 aa, synthetic construct
MAADGYLPDWLEDNLSEGIREWWALKPGAPQPKANQQHQDNARGLVLPGYKYLGPGNGLDKGEPVNAADAAALEHDKAYDQQLKAGDNPYLKYNHADAEFQERLKEDTSFGGNLGRAVFQAKKRLLEPLGLVEEAAKTAPGKKRPVEQSPQEPDSSAGIDKSGAQPAKKRLNFGQTGDTESVPDPQPIGEPPAAPSGVGSLTMASGGGAPVADNNEGADGVGSSSGNWHCDSQWLGDRVITTSTRTWALPTYNNHLYKQISNSTSGGSSNDNAYFGYSTPWGYFDFNRFHCHFSPRDWQRLINNNWGFRPKRLNFKLFNIQVKEVTDNNGVKTIANNLTSTVQVFADSDYQLPYVLGSAHEGCLPPFPADVFMIPQYGYLTLNDGSQAVGRSSFYCLEYFPSQMLRTGNNFQFSYEFENVPFHSSYAHSQSLDRLMNPLIDQYLYYLSKTINGSGQNQQTLKFSVAGPSNMAVQGRNYIPGPSYRQQRVSTTVTQNNNSEIAWPRASSWALNGRNSLMNPGPAMASHKEGEDRFFPLSGSLIFGKQGTGRDNVDADKVMITNEEEIKTTNPVATESYGQVATNHQSAQAQAQTGWVQNQGILPGMVWQDRDVYLQGPIWAKIPHTDGNFHPSPLMGGFGMKHPPPQILIKNTPVPADPPTAFNKDKLNSFITQYSTGQVSVEIEWELQKENSKRWNPEIQYTSNLCKSNNVEFAVNTEGVYSEPRPIGTRYLTRNL

SEQ ID NO: 1025 - protein, 736 aa, synthetic construct
MAADGYLPDWLEDNLSEGIREWWALKPGAPQPKANQQHQDNARGLVLPGYKYLGPGNGLDKGEPVNAADAAALEHDKAYDQQLKAGDNPYLKYNHADAEFQERLKEDTSFGGNLGRAVLQAKKRLLEPLGLVEEAAKTAPGKKRPVEQSPQEPDSSAGIGKSGAQPAKKRLNFGQTGDTESVPDPQPIGEPPAAPSGVGSLTMASGGGAPVADNNEGADGVGSSSGNWHCDSQWLGDRVITTSTRTWALPTYNNHLYKQISNSTSGGSSNDNAYFGYSTPWGYFDFNRFHCHFSPRDWQRLINNNWGFRPKRLNFKLFNIQVKEVTDNNGVKTIANNLTSTVQVFGDSDYQLPYVLGSAHEGCLPPFPADVFMIPQYGYLTLNDGSQAVGRSSFYCLEYFPSQMLRTGNNFQFSYEFENVPFHSSYAHSQSLDRLMNPLIDQYLYYLSKTINGSGQNQQTLKFSVAGSSNMAVQGRNYIPGPSYRQQRVSTTVTQNNNSEFAWPGASSWALNGRNSLMNPGPAMASHKEGEDRFFPLSGSLIFGKQGTGRDNVDADKVMITNEEEIKTTNPVATESYGQVATNHQSAQAQAQTGWVQNQGILPGMVWQDRDVYLQGPIWAKIPHTDGNFHPSPLMGGFGMKHPPPQILIKNTPVPADPPTAFNKDKLNSFITQYSTGQVSVEIEWELQKENSKRWNPEIQYTSNYYKSNNVEFAVNTEGVYSEPRPIGTRYLTRNL

SEQ ID NO: 1026 - protein, 736 aa, synthetic construct
MAADGYLPDWLEDNLSEGIREWWALKPGAPQPKANQQHQDNARGLVLPGYKYLGPGNGLDKGEPVNAADAAALEHDKAYDQQLKAGDNPYLKYNHADAEFQERLKEDTSFGGNLGRAVLQAKKRLLEPLGLVEEAAKTAPGKKRPVEQSPQEPDSSAGIGKSGAQPAKKRLNFGQTGDTESVPDPQPIGEPPAAPSGVGSLTMASGGGAPVADNNEGADGVGSSSGNWHCDSQWLGDRVITTSTRTWALPTYNNHLYKQISNSTSGGSSNDNAYFGYSTPWGYFDFNRFHCHFSPRDWQRLINNNWGFRPKRLNFKLFNIQVKEVTDNNGVKTIANNLTSTVQVFGDSDYQLPYVLGSAHEGCLPPFPADVFMIPQYGYLTLNDGSQAVGRSSFYCLEYFPSQMLRTGNNFQFSYEFENVPFHSSYAHSQSLDRLMNPLIDQYLYYLSKTINGSGQNQQTLKFSVAGSSNMAVQGRNYIPGPSYRQQRVSTTVTQNNNSEIAWPGASSWALNGRNSLMNPGPAMASHKEGEDRFFPLSGSLIFGKQGTGRDNVDADKVMITNEEEIKTTNPVATESYGQVATNHQSAQAQAQTGWVQNQGILPGMVWQDRDVYLQGPIWAKIPHTDGNFHPSPLMGGFGMKHPPPQILIKNTPVPADPPTAFNKDKLNSFITQYSTGQVSVEIEWELQKENSKRWNPEIQYTSNYYKSNNVEFAVNTEGVYSEPRPIGTRYLTRNL

SEQ ID NO: 1027 - protein, 736 aa, synthetic construct
MAADGYLPDWLEDNLSEGIREWWALKPGAPQPKANQQHQDNARGLVLPGYKYLGPGNGLDKGEPVNAADAAALEHDKAYDQQLKAGDNPYLKYNHADAEFQERLKEDTSFGGNLGRAVLQAKKRLLEPLGLVEEAAKTAPGKKRPVEQSPQEPDSSAGIGKSGAQPAKKRLNFGQTGDTESVPDPQPIGEPPAAPSGVGSLTMASGGGAPVADNNEGADGVGSSSGNWHCDSQWLGDRVITTSTRTWALPTYNNHLYKQISNSTSGGSSNDNAYFGYSTPWGYFDFNRFHCHFSPRDWQRLINNNWGFRPKRLNFKLFNIQVKEVTDNNGVKTIANNLTSTVQVFGDSDYQLPYVLGSAHEGCLPPFPADVFMIPQYGYLTLNDGSQAVGRSSFYCLEYFPSQMLRTGNNFQFSYEFENVPFHSSYAHSQSLDRLMNPLIDQYLYYLSKTINGSGQNQQTLKFSVAGSSNMAVQGRNYIPGPSYRQQRVSTTVTQNNNSEFAWPRASSWALNGRNSLMNPGPAMASHKEGEDRFFPLSGSLIFGKQGTGRDNVDADKVMITNEEEIKTTNPVATESYGQVATNHQSAQAQAQTGWVQNQGILPGMVWQDRDVYLQGPIWAKIPHTDGNFHPSPLMGGFGMKHPPPQILIKNTPVPADPPTAFNKDKLNSFITQYSTGQVSVEIEWELQKENSKRWNPEIQYTSNYYKSNNVEFAVNTEGVYSEPRPIGTRYLTRNL

SEQ ID NO: 1028 - protein, 736 aa, synthetic construct
MAADGYLPDWLEDNLSEGIREWWALKPGAPQPKANQQHQDNARGLVLPGYKYLGPGNGLDKGEPVNAADAAALEHDKAYDQQLKAGDNPYLKYNHADAEFQERLKEDTSFGGNLGRAVLQAKKRLLEPLGLVEEAAKTAPGKKRPVEQSPQEPDSSAGIGKSGAQPAKKRLNFGQTGDTESVPDPQPIGEPPAAPSGVGSLTMASGGGAPVADNNEGADGVGSSSGNWHCDSQWLGDRVITTSTRTWALPTYNNHLYKQISNSTSGGSSNDNAYFGYSTPWGYFDFNRFHCHFSPRDWQRLINNNWGFRPKRLNFKLFNIQVKEVTDNNGVKTIANNLTSTVQVFGDSDYQLPYVLGSAHEGCLPPFPADVFMIPQYGYLTLNDGSQAVGRSSFYCLEYFPSQMLRTGNNFQFSYEFENVPFHSSYAHSQSLDRLMNPLIDQYLYYLSKTINGSGQNQQTLKFSVAGSSNMAVQGRNYIPGPSYRQQRVSTTVTQNNNSEFAWPGASSWALNGRNSLMNPGPAMASHKEGEDRFFPLSGSLIFGKQGTGRDNVDADKVMITNEEEIKTTNPVATESYGQVATNHQSAQAQAQTGWVQNQGILPGMVWQDRDVYLQGPIWAKIPHTDGNFHPSPLMGGFGMKHPPPQILIKNTPVPADPPTAFNKDKLNSFITQYSTGQVSVEIEWELQKENSKRWNPEIQYTSNYCKSNNVEFAVNTEGVYSEPRPIGTRYLTRNL

SEQ ID NO: 1029 - protein, 736 aa, synthetic construct
MAADGYLPDWLEDNLSEGIREWWALKPGAPQPKANQQHQDNARGLVLPGYKYLGPGNGLDKGEPVNAADAAALEHDKAYDQQLKAGDNPYLKYNHADAEFQERLKEDTSFGGNLGRAVLQAKKRLLEPLGLVEEAAKTAPGKKRPVEQSPQEPDSSAGIGKSGAQPAKKRLNFGQTGDTESVPDPQPIGEPPAAPSGVGSLTMASGGGAPVADNNEGADGVGSSSGNWHCDSQWLGDRVITTSTRTWALPTYNNHLYKQISNSTSGGSSNDNAYFGYSTPWGYFDFNRFHCHFSPRDWQRLINNNWGFRPKRLNFKLFNIQVKEVTDNNGVKTIANNLTSTVQVFGDSDYQLPYVLGSAHEGCLPPFPADVFMIPQYGYLTLNDGSQAVGRSSFYCLEYFPSQMLRTGNNFQFSYEFENVPFHSSYAHSQSLDRLMNPLIDQYLYYLSKTINGSGQNQQTLKFSVAGSSNMAVQGRNYIPGPSYRQQRVSTTVTQNNNSEIAWPRASSWALNGRNSLMNPGPAMASHKEGEDRFFPLSGSLIFGKQGTGRDNVDADKVMITNEEEIKTTNPVATESYGQVATNHQSAQAQAQTGWVQNQGILPGMVWQDRDVYLQGPIWAKIPHTDGNFHPSPLMGGFGMKHPPPQILIKNTPVPADPPTAFNKDKLNSFITQYSTGQVSVEIEWELQKENSKRWNPEIQYTSNYYKSNNVEFAVNTEGVYSEPRPIGTRYLTRNL

SEQ ID NO: 1030 - protein, 736 aa, synthetic construct
MAADGYLPDWLEDNLSEGIREWWALKPGAPQPKANQQHQDNARGLVLPGYKYLGPGNGLDKGEPVNAADAAALEHDKAYDQQLKAGDNPYLKYNHADAEFQERLKEDTSFGGNLGRAVLQAKKRLLEPLGLVEEAAKTAPGKKRPVEQSPQEPDSSAGIGKSGAQPAKKRLNFGQTGDTESVPDPQPIGEPPAAPSGVGSLTMASGGGAPVADNNEGADGVGSSSGNWHCDSQWLGDRVITTSTRTWALPTYNNHLYKQISNSTSGGSSNDNAYFGYSTPWGYFDFNRFHCHFSPRDWQRLINNNWGFRPKRLNFKLFNIQVKEVTDNNGVKTIANNLTSTVQVFGDSDYQLPYVLGSAHEGCLPPFPADVFMIPQYGYLTLNDGSQAVGRSSFYCLEYFPSQMLRTGNNFQFSYEFENVPFHSSYAHSQSLDRLMNPLIDQYLYYLSKTINGSGQNQQTLKFSVAGSSNMAVQGRNYIPGPSYRQQRVSTTVTQNNNSEIAWPGASSWALNGRNSLMNPGPAMASHKEGEDRFFPLSGSLIFGKQGTGRDNVDADKVMITNEEEIKTTNPVATESYGQVATNHQSAQAQAQTGWVQNQGILPGMVWQDRDVYLQGPIWAKIPHTDGNFHPSPLMGGFGMKHPPPQILIKNTPVPADPPTAFNKDKLNSFITQYSTGQVSVEIEWELQKENSKRWNPEIQYTSNYCKSNNVEFAVNTEGVYSEPRPIGTRYLTRNL

SEQ ID NO: 1031 - protein, 736 aa, synthetic construct
MAADGYLPDWLEDNLSEGIREWWALKPGAPQPKANQQHQDNARGLVLPGYKYLGPGNGLDKGEPVNAADAAALEHDKAYDQQLKAGDNPYLKYNHADAEFQERLKEDTSFGGNLGRAVLQAKKRLLEPLGLVEEAAKTAPGKKRPVEQSPQEPDSSAGIGKSGAQPAKKRLNFGQTGDTESVPDPQPIGEPPAAPSGVGSLTMASGGGAPVADNNEGADGVGSSSGNWHCDSQWLGDRVITTSTRTWALPTYNNHLYKQISNSTSGGSSNDNAYFGYSTPWGYFDFNRFHCHFSPRDWQRLINNNWGFRPKRLNFKLFNIQVKEVTDNNGVKTIANNLTSTVQVFGDSDYQLPYVLGSAHEGCLPPFPADVFMIPQYGYLTLNDGSQAVGRSSFYCLEYFPSQMLRTGNNFQFSYEFENVPFHSSYAHSQSLDRLMNPLIDQYLYYLSKTINGSGQNQQTLKFSVAGSSNMAVQGRNYIPGPSYRQQRVSTTVTQNNNSEFAWPRASSWALNGRNSLMNPGPAMASHKEGEDRFFPLSGSLIFGKQGTGRDNVDADKVMITNEEEIKTTNPVATESYGQVATNHQSAQAQAQTGWVQNQGILPGMVWQDRDVYLQGPIWAKIPHTDGNFHPSPLMGGFGMKHPPPQILIKNTPVPADPPTAFNKDKLNSFITQYSTGQVSVEIEWELQKENSKRWNPEIQYTSNYCKSNNVEFAVNTEGVYSEPRPIGTRYLTRNL

SEQ ID NO: 1032 - protein, 736 aa, synthetic construct
MAADGYLPDWLEDNLSEGIREWWALKPGAPQPKANQQHQDNARGLVLPGYKYLGPGNGLDKGEPVNAADAAALEHDKAYDQQLKAGDNPYLKYNHADAEFQERLKEDTSFGGNLGRAVLQAKKRLLEPLGLVEEAAKTAPGKKRPVEQSPQEPDSSAGIGKSGAQPAKKRLNFGQTGDTESVPDPQPIGEPPAAPSGVGSLTMASGGGAPVADNNEGADGVGSSSGNWHCDSQWLGDRVITTSTRTWALPTYNNHLYKQISNSTSGGSSNDNAYFGYSTPWGYFDFNRFHCHFSPRDWQRLINNNWGFRPKRLNFKLFNIQVKEVTDNNGVKTIANNLTSTVQVFGDSDYQLPYVLGSAHEGCLPPFPADVFMIPQYGYLTLNDGSQAVGRSSFYCLEYFPSQMLRTGNNFQFSYEFENVPFHSSYAHSQSLDRLMNPLIDQYLYYLSKTINGSGQNQQTLKFSVAGSSNMAVQGRNYIPGPSYRQQRVSTTVTQNNNSEIAWPRASSWALNGRNSLMNPGPAMASHKEGEDRFFPLSGSLIFGKQGTGRDNVDADKVMITNEEEIKTTNPVATESYGQVATNHQSAQAQAQTGWVQNQGILPGMVWQDRDVYLQGPIWAKIPHTDGNFHPSPLMGGFGMKHPPPQILIKNTPVPADPPTAFNKDKLNSFITQYSTGQVSVEIEWELQKENSKRWNPEIQYTSNYCKSNNVEFAVNTEGVYSEPRPIGTRYLTRNL

SEQ ID NO: 1033 - protein, 736 aa, synthetic construct
MAADGYLPDWLEDNLSEGIREWWALKPGAPQPKANQQHQDNARGLVLPGYKYLGPGNGLDKGEPVNAADAAALEHDKAYDQQLKAGDNPYLKYNHADAEFQERLKEDTSFGGNLGRAVLQAKKRLLEPLGLVEEAAKTAPGKKRPVEQSPQEPDSSAGIGKSGAQPAKKRLNFGQTGDTESVPDPQPIGEPPAAPSGVGSLTMASGGGAPVADNNEGADGVGSSSGNWHCDSQWLGDRVITTSTRTWALPTYNNHLYKQISNSTSGGSSNDNAYFGYSTPWGYFDFNRFHCHFSPRDWQRLINNNWGFRPKRLNFKLFNIQVKEVTDNNGVKTIANNLTSTVQVFTDSDYQLPYVLGSAHEGCLPPFPADVFMIPQYGYLTLNDGSQAVGRSSFYCLEYFPSQMLRTGNNFQFSYEFENVPFHSSYAHSQSLDRLMNPLIDQYLYYLSKTINGSGQNQQTLKFSVAGSSNMAVQGRNYIPGPSYRQQRVSTTVTQNNNSEFAWPGASSWALNGRNSLMNPGPAMASHKEGEDRFFPLSGSLIFGKQGTGRDNVDADKVMITNEEEIKTTNPVATESYGQVATNHQSAQAQAQTGWVQNQGILPGMVWQDRDVYLQGPIWAKIPHTDGNFHPSPLMGGFGMKHPPPQILIKNTPVPADPPTAFNKDKLNSFITQYSTGQVSVEIEWELQKENSKRWNPEIQYTSNLYKSNNVEFAVNTEGVYSEPRPIGTRYLTRNL

SEQ ID NO: 1034 - protein, 736 aa, synthetic construct
MAADGYLPDWLEDNLSEGIREWWALKPGAPQPKANQQHQDNARGLVLPGYKYLGPGNGLDKGEPVNAADAAALEHDKAYDQQLKAGDNPYLKYNHADAEFQERLKEDTSFGGNLGRAVLQAKKRLLEPLGLVEEAAKTAPGKKRPVEQSPQEPDSSAGIGKSGAQPAKKRLNFGQTGDTESVPDPQPIGEPPAAPSGVGSLTMASGGGAPVADNNEGADGVGSSSGNWHCDSQWLGDRVITTSTRTWALPTYNNHLYKQISNSTSGGSSNDNAYFGYSTPWGYFDFNRFHCHFSPRDWQRLINNNWGFRPKRLNFKLFNIQVKEVTDNNGVKTIANNLTSTVQVFTDSDYQLPYVLGSAHEGCLPPFPADVFMIPQYGYLTLNDGSQAVGRSSFYCLEYFPSQMLRTGNNFQFSYEFENVPFHSSYAHSQSLDRLMNPLIDQYLYYLSKTINGSGQNQQTLKFSVAGSSNMAVQGRNYIPGPSYRQQRVSTTVTQNNNSEIAWPGASSWALNGRNSLMNPGPAMASHKEGEDRFFPLSGSLIFGKQGTGRDNVDADKVMITNEEEIKTTNPVATESYGQVATNHQSAQAQAQTGWVQNQGILPGMVWQDRDVYLQGPIWAKIPHTDGNFHPSPLMGGFGMKHPPPQILIKNTPVPADPPTAFNKDKLNSFITQYSTGQVSVEIEWELQKENSKRWNPEIQYTSNLYKSNNVEFAVNTEGVYSEPRPIGTRYLTRNL

SEQ ID NO: 1035 - protein, 736 aa, synthetic construct
MAADGYLPDWLEDNLSEGIREWWALKPGAPQPKANQQHQDNARGLVLPGYKYLGPGNGLDKGEPVNAADAAALEHDKAYDQQLKAGDNPYLKYNHADAEFQERLKEDTSFGGNLGRAVLQAKKRLLEPLGLVEEAAKTAPGKKRPVEQSPQEPDSSAGIGKSGAQPAKKRLNFGQTGDTESVPDPQPIGEPPAAPSGVGSLTMASGGGAPVADNNEGADGVGSSSGNWHCDSQWLGDRVITTSTRTWALPTYNNHLYKQISNSTSGGSSNDNAYFGYSTPWGYFDFNRFHCHFSPRDWQRLINNNWGFRPKRLNFKLFNIQVKEVTDNNGVKTIANNLTSTVQVFTDSDYQLPYVLGSAHEGCLPPFPADVFMIPQYGYLTLNDGSQAVGRSSFYCLEYFPSQMLRTGNNFQFSYEFENVPFHSSYAHSQSLDRLMNPLIDQYLYYLSKTINGSGQNQQTLKFSVAGSSNMAVQGRNYIPGPSYRQQRVSTTVTQNNNSEFAWPRASSWALNGRNSLMNPGPAMASHKEGEDRFFPLSGSLIFGKQGTGRDNVDADKVMITNEEEIKTTNPVATESYGQVATNHQSAQAQAQTGWVQNQGILPGMVWQDRDVYLQGPIWAKIPHTDGNFHPSPLMGGFGMKHPPPQILIKNTPVPADPPTAFNKDKLNSFITQYSTGQVSVEIEWELQKENSKRWNPEIQYTSNLYKSNNVEFAVNTEGVYSEPRPIGTRYLTRNL

SEQ ID NO: 1036 - protein, 736 aa, synthetic construct
MAADGYLPDWLEDNLSEGIREWWALKPGAPQPKANQQHQDNARGLVLPGYKYLGPGNGLDKGEPVNAADAAALEHDKAYDQQLKAGDNPYLKYNHADAEFQERLKEDTSFGGNLGRAVLQAKKRLLEPLGLVEEAAKTAPGKKRPVEQSPQEPDSSAGIGKSGAQPAKKRLNFGQTGDTESVPDPQPIGEPPAAPSGVGSLTMASGGGAPVADNNEGADGVGSSSGNWHCDSQWLGDRVITTSTRTWALPTYNNHLYKQISNSTSGGSSNDNAYFGYSTPWGYFDFNRFHCHFSPRDWQRLINNNWGFRPKRLNFKLFNIQVKEVTDNNGVKTIANNLTSTVQVFTDSDYQLPYVLGSAHEGCLPPFPADVFMIPQYGYLTLNDGSQAVGRSSFYCLEYFPSQMLRTGNNFQFSYEFENVPFHSSYAHSQSLDRLMNPLIDQYLYYLSKTINGSGQNQQTLKFSVAGSSNMAVQGRNYIPGPSYRQQRVSTTVTQNNNSEFAWPGASSWALNGRNSLMNPGPAMASHKEGEDRFFPLSGSLIFGKQGTGRDNVDADKVMITNEEEIKTTNPVATESYGQVATNHQSAQAQAQTGWVQNQGILPGMVWQDRDVYLQGPIWAKIPHTDGNFHPSPLMGGFGMKHPPPQILIKNTPVPADPPTAFNKDKLNSFITQYSTGQVSVEIEWELQKENSKRWNPEIQYTSNLCKSNNVEFAVNTEGVYSEPRPIGTRYLTRNL

SEQ ID NO: 1037 - protein, 736 aa, synthetic construct
MAADGYLPDWLEDNLSEGIREWWALKPGAPQPKANQQHQDNARGLVLPGYKYLGPGNGLDKGEPVNAADAAALEHDKAYDQQLKAGDNPYLKYNHADAEFQERLKEDTSFGGNLGRAVLQAKKRLLEPLGLVEEAAKTAPGKKRPVEQSPQEPDSSAGIGKSGAQPAKKRLNFGQTGDTESVPDPQPIGEPPAAPSGVGSLTMASGGGAPVADNNEGADGVGSSSGNWHCDSQWLGDRVITTSTRTWALPTYNNHLYKQISNSTSGGSSNDNAYFGYSTPWGYFDFNRFHCHFSPRDWQRLINNNWGFRPKRLNFKLFNIQVKEVTDNNGVKTIANNLTSTVQVFTDSDYQLPYVLGSAHEGCLPPFPADVFMIPQYGYLTLNDGSQAVGRSSFYCLEYFPSQMLRTGNNFQFSYEFENVPFHSSYAHSQSLDRLMNPLIDQYLYYLSKTINGSGQNQQTLKFSVAGSSNMAVQGRNYIPGPSYRQQRVSTTVTQNNNSEIAWPRASSWALNGRNSLMNPGPAMASHKEGEDRFFPLSGSLIFGKQGTGRDNVDADKVMITNEEEIKTTNPVATESYGQVATNHQSAQAQAQTGWVQNQGILPGMVWQDRDVYLQGPIWAKIPHTDGNFHPSPLMGGFGMKHPPPQILIKNTPVPADPPTAFNKDKLNSFITQYSTGQVSVEIEWELQKENSKRWNPEIQYTSNLYKSNNVEFAVNTEGVYSEPRPIGTRYLTRNL

SEQ ID NO: 1038 - protein, 736 aa, synthetic construct
MAADGYLPDWLEDNLSEGIREWWALKPGAPQPKANQQHQDNARGLVLPGYKYLGPGNGLDKGEPVNAADAAALEHDKAYDQQLKAGDNPYLKYNHADAEFQERLKEDTSFGGNLGRAVLQAKKRLLEPLGLVEEAAKTAPGKKRPVEQSPQEPDSSAGIGKSGAQPAKKRLNFGQTGDTESVPDPQPIGEPPAAPSGVGSLTMASGGGAPVADNNEGADGVGSSSGNWHCDSQWLGDRVITTSTRTWALPTYNNHLYKQISNSTSGGSSNDNAYFGYSTPWGYFDFNRFHCHFSPRDWQRLINNNWGFRPKRLNFKLFNIQVKEVTDNNGVKTIANNLTSTVQVFTDSDYQLPYVLGSAHEGCLPPFPADVFMIPQYGYLTLNDGSQAVGRSSFYCLEYFPSQMLRTGNNFQFSYEFENVPFHSSYAHSQSLDRLMNPLIDQYLYYLSKTINGSGQNQQTLKFSVAGSSNMAVQGRNYIPGPSYRQQRVSTTVTQNNNSEIAWPGASSWALNGRNSLMNPGPAMASHKEGEDRFFPLSGSLIFGKQGTGRDNVDADKVMITNEEEIKTTNPVATESYGQVATNHQSAQAQAQTGWVQNQGILPGMVWQDRDVYLQGPIWAKIPHTDGNFHPSPLMGGFGMKHPPPQILIKNTPVPADPPTAFNKDKLNSFITQYSTGQVSVEIEWELQKENSKRWNPEIQYTSNLCKSNNVEFAVNTEGVYSEPRPIGTRYLTRNL

SEQ ID NO: 1039 - protein, 736 aa, synthetic construct
MAADGYLPDWLEDNLSEGIREWWALKPGAPQPKANQQHQDNARGLVLPGYKYLGPGNGLDKGEPVNAADAAALEHDKAYDQQLKAGDNPYLKYNHADAEFQERLKEDTSFGGNLGRAVLQAKKRLLEPLGLVEEAAKTAPGKKRPVEQSPQEPDSSAGIGKSGAQPAKKRLNFGQTGDTESVPDPQPIGEPPAAPSGVGSLTMASGGGAPVADNNEGADGVGSSSGNWHCDSQWLGDRVITTSTRTWALPTYNNHLYKQISNSTSGGSSNDNAYFGYSTPWGYFDFNRFHCHFSPRDWQRLINNNWGFRPKRLNFKLFNIQVKEVTDNNGVKTIANNLTSTVQVFTDSDYQLPYVLGSAHEGCLPPFPADVFMIPQYGYLTLNDGSQAVGRSSFYCLEYFPSQMLRTGNNFQFSYEFENVPFHSSYAHSQSLDRLMNPLIDQYLYYLSKTINGSGQNQQTLKFSVAGSSNMAVQGRNYIPGPSYRQQRVSTTVTQNNNSEFAWPRASSWALNGRNSLMNPGPAMASHKEGEDRFFPLSGSLIFGKQGTGRDNVDADKVMITNEEEIKTTNPVATESYGQVATNHQSAQAQAQTGWVQNQGILPGMVWQDRDVYLQGPIWAKIPHTDGNFHPSPLMGGFGMKHPPPQILIKNTPVPADPPTAFNKDKLNSFITQYSTGQVSVEIEWELQKENSKRWNPEIQYTSNLCKSNNVEFAVNTEGVYSEPRPIGTRYLTRNL

SEQ ID NO: 1040 - protein, 736 aa, synthetic construct
MAADGYLPDWLEDNLSEGIREWWALKPGAPQPKANQQHQDNARGLVLPGYKYLGPGNGLDKGEPVNAADAAALEHDKAYDQQLKAGDNPYLKYNHADAEFQERLKEDTSFGGNLGRAVLQAKKRLLEPLGLVEEAAKTAPGKKRPVEQSPQEPDSSAGIGKSGAQPAKKRLNFGQTGDTESVPDPQPIGEPPAAPSGVGSLTMASGGGAPVADNNEGADGVGSSSGNWHCDSQWLGDRVITTSTRTWALPTYNNHLYKQISNSTSGGSSNDNAYFGYSTPWGYFDFNRFHCHFSPRDWQRLINNNWGFRPKRLNFKLFNIQVKEVTDNNGVKTIANNLTSTVQVFTDSDYQLPYVLGSAHEGCLPPFPADVFMIPQYGYLTLNDGSQAVGRSSFYCLEYFPSQMLRTGNNFQFSYEFENVPFHSSYAHSQSLDRLMNPLIDQYLYYLSKTINGSGQNQQTLKFSVAGSSNMAVQGRNYIPGPSYRQQRVSTTVTQNNNSEIAWPRASSWALNGRNSLMNPGPAMASHKEGEDRFFPLSGSLIFGKQGTGRDNVDADKVMITNEEEIKTTNPVATESYGQVATNHQSAQAQAQTGWVQNQGILPGMVWQDRDVYLQGPIWAKIPHTDGNFHPSPLMGGFGMKHPPPQILIKNTPVPADPPTAFNKDKLNSFITQYSTGQVSVEIEWELQKENSKRWNPEIQYTSNLCKSNNVEFAVNTEGVYSEPRPIGTRYLTRNL

SEQ ID NO: 1041 - protein, 736 aa, synthetic construct
MAADGYLPDWLEDNLSEGIREWWALKPGAPQPKANQQHQDNARGLVLPGYKYLGPGNGLDKGEPVNAADAAALEHDKAYDQQLKAGDNPYLKYNHADAEFQERLKEDTSFGGNLGRAVLQAKKRLLEPLGLVEEAAKTAPGKKRPVEQSPQEPDSSAGIGKSGAQPAKKRLNFGQTGDTESVPDPQPIGEPPAAPSGVGSLTMASGGGAPVADNNEGADGVGSSSGNWHCDSQWLGDRVITTSTRTWALPTYNNHLYKQISNSTSGGSSNDNAYFGYSTPWGYFDFNRFHCHFSPRDWQRLINNNWGFRPKRLNFKLFNIQVKEVTDNNGVKTIANNLTSTVQVFGDSDYQLPYVLGSAHEGCLPPFPADVFMIPQYGYLTLNDGSQAVGRSSFYCLEYFPSQMLRTGNNFQFSYEFENVPFHSSYAHSQSLDRLMNPLIDQYLYYLSKTINGSGQNQQTLKFSVAGSSNMAVQGRNYIPGPSYRQQRVSTTVTQNNNSEFAWPGASSWALNGRNSLMNPGPAMASHKEGEDRFFPLSGSLIFGKQGTGRDNVDADKVMITNEEEIKTTNPVATESYGQVATNHQSAQAQAQTGWVQNQGILPGMVWQDRDVYLQGPIWAKIPHTDGNFHPSPLMGGFGMKHPPPQILIKNTPVPADPPTAFNKDKLNSFITQYSTGQVSVEIEWELQKENSKRWNPEIQYTSNLYKSNNVEFAVNTEGVYSEPRPIGTRYLTRNL

SEQ ID NO: 1042 - protein, 736 aa, synthetic construct
MAADGYLPDWLEDNLSEGIREWWALKPGAPQPKANQQHQDNARGLVLPGYKYLGPGNGLDKGEPVNAADAAALEHDKAYDQQLKAGDNPYLKYNHADAEFQERLKEDTSFGGNLGRAVLQAKKRLLEPLGLVEEAAKTAPGKKRPVEQSPQEPDSSAGIGKSGAQPAKKRLNFGQTGDTESVPDPQPIGEPPAAPSGVGSLTMASGGGAPVADNNEGADGVGSSSGNWHCDSQWLGDRVITTSTRTWALPTYNNHLYKQISNSTSGGSSNDNAYFGYSTPWGYFDFNRFHCHFSPRDWQRLINNNWGFRPKRLNFKLFNIQVKEVTDNNGVKTIANNLTSTVQVFGDSDYQLPYVLGSAHEGCLPPFPADVFMIPQYGYLTLNDGSQAVGRSSFYCLEYFPSQMLRTGNNFQFSYEFENVPFHSSYAHSQSLDRLMNPLIDQYLYYLSKTINGSGQNQQTLKFSVAGSSNMAVQGRNYIPGPSYRQQRVSTTVTQNNNSEIAWPGASSWALNGRNSLMNPGPAMASHKEGEDRFFPLSGSLIFGKQGTGRDNVDADKVMITNEEEIKTTNPVATESYGQVATNHQSAQAQAQTGWVQNQGILPGMVWQDRDVYLQGPIWAKIPHTDGNFHPSPLMGGFGMKHPPPQILIKNTPVPADPPTAFNKDKLNSFITQYSTGQVSVEIEWELQKENSKRWNPEIQYTSNLYKSNNVEFAVNTEGVYSEPRPIGTRYLTRNL

SEQ ID NO: 1043 - protein, 736 aa, synthetic construct
MAADGYLPDWLEDNLSEGIREWWALKPGAPQPKANQQHQDNARGLVLPGYKYLGPGNGLDKGEPVNAADAAALEHDKAYDQQLKAGDNPYLKYNHADAEFQERLKEDTSFGGNLGRAVLQAKKRLLEPLGLVEEAAKTAPGKKRPVEQSPQEPDSSAGIGKSGAQPAKKRLNFGQTGDTESVPDPQPIGEPPAAPSGVGSLTMASGGGAPVADNNEGADGVGSSSGNWHCDSQWLGDRVITTSTRTWALPTYNNHLYKQISNSTSGGSSNDNAYFGYSTPWGYFDFNRFHCHFSPRDWQRLINNNWGFRPKRLNFKLFNIQVKEVTDNNGVKTIANNLTSTVQVFGDSDYQLPYVLGSAHEGCLPPFPADVFMIPQYGYLTLNDGSQAVGRSSFYCLEYFPSQMLRTGNNFQFSYEFENVPFHSSYAHSQSLDRLMNPLIDQYLYYLSKTINGSGQNQQTLKFSVAGSSNMAVQGRNYIPGPSYRQQRVSTTVTQNNNSEFAWPRASSWALNGRNSLMNPGPAMASHKEGEDRFFPLSGSLIFGKQGTGRDNVDADKVMITNEEEIKTTNPVATESYGQVATNHQSAQAQAQTGWVQNQGILPGMVWQDRDVYLQGPIWAKIPHTDGNFHPSPLMGGFGMKHPPPQILIKNTPVPADPPTAFNKDKLNSFITQYSTGQVSVEIEWELQKENSKRWNPEIQYTSNLYKSNNVEFAVNTEGVYSEPRPIGTRYLTRNL

SEQ ID NO: 1044 - protein, 736 aa, synthetic construct
MAADGYLPDWLEDNLSEGIREWWALKPGAPQPKANQQHQDNARGLVLPGYKYLGPGNGLDKGEPVNAADAAALEHDKAYDQQLKAGDNPYLKYNHADAEFQERLKEDTSFGGNLGRAVLQAKKRLLEPLGLVEEAAKTAPGKKRPVEQSPQEPDSSAGIGKSGAQPAKKRLNFGQTGDTESVPDPQPIGEPPAAPSGVGSLTMASGGGAPVADNNEGADGVGSSSGNWHCDSQWLGDRVITTSTRTWALPTYNNHLYKQISNSTSGGSSNDNAYFGYSTPWGYFDFNRFHCHFSPRDWQRLINNNWGFRPKRLNFKLFNIQVKEVTDNNGVKTIANNLTSTVQVFGDSDYQLPYVLGSAHEGCLPPFPADVFMIPQYGYLTLNDGSQAVGRSSFYCLEYFPSQMLRTGNNFQFSYEFENVPFHSSYAHSQSLDRLMNPLIDQYLYYLSKTINGSGQNQQTLKFSVAGSSNMAVQGRNYIPGPSYRQQRVSTTVTQNNNSEFAWPGASSWALNGRNSLMNPGPAMASHKEGEDRFFPLSGSLIFGKQGTGRDNVDADKVMITNEEEIKTTNPVATESYGQVATNHQSAQAQAQTGWVQNQGILPGMVWQDRDVYLQGPIWAKIPHTDGNFHPSPLMGGFGMKHPPPQILIKNTPVPADPPTAFNKDKLNSFITQYSTGQVSVEIEWELQKENSKRWNPEIQYTSNLCKSNNVEFAVNTEGVYSEPRPIGTRYLTRNL

SEQ ID NO: 1045 - protein, 736 aa, synthetic construct
MAADGYLPDWLEDNLSEGIREWWALKPGAPQPKANQQHQDNARGLVLPGYKYLGPGNGLDKGEPVNAADAAALEHDKAYDQQLKAGDNPYLKYNHADAEFQERLKEDTSFGGNLGRAVLQAKKRLLEPLGLVEEAAKTAPGKKRPVEQSPQEPDSSAGIGKSGAQPAKKRLNFGQTGDTESVPDPQPIGEPPAAPSGVGSLTMASGGGAPVADNNEGADGVGSSSGNWHCDSQWLGDRVITTSTRTWALPTYNNHLYKQISNSTSGGSSNDNAYFGYSTPWGYFDFNRFHCHFSPRDWQRLINNNWGFRPKRLNFKLFNIQVKEVTDNNGVKTIANNLTSTVQVFGDSDYQLPYVLGSAHEGCLPPFPADVFMIPQYGYLTLNDGSQAVGRSSFYCLEYFPSQMLRTGNNFQFSYEFENVPFHSSYAHSQSLDRLMNPLIDQYLYYLSKTINGSGQNQQTLKFSVAGSSNMAVQGRNYIPGPSYRQQRVSTTVTQNNNSEIAWPRASSWALNGRNSLMNPGPAMASHKEGEDRFFPLSGSLIFGKQGTGRDNVDADKVMITNEEEIKTTNPVATESYGQVATNHQSAQAQAQTGWVQNQGILPGMVWQDRDVYLQGPIWAKIPHTDGNFHPSPLMGGFGMKHPPPQILIKNTPVPADPPTAFNKDKLNSFITQYSTGQVSVEIEWELQKENSKRWNPEIQYTSNLYKSNNVEFAVNTEGVYSEPRPIGTRYLTRNL

SEQ ID NO: 1046 - protein, 736 aa, synthetic construct
MAADGYLPDWLEDNLSEGIREWWALKPGAPQPKANQQHQDNARGLVLPGYKYLGPGNGLDKGEPVNAADAAALEHDKAYDQQLKAGDNPYLKYNHADAEFQERLKEDTSFGGNLGRAVLQAKKRLLEPLGLVEEAAKTAPGKKRPVEQSPQEPDSSAGIGKSGAQPAKKRLNFGQTGDTESVPDPQPIGEPPAAPSGVGSLTMASGGGAPVADNNEGADGVGSSSGNWHCDSQWLGDRVITTSTRTWALPTYNNHLYKQISNSTSGGSSNDNAYFGYSTPWGYFDFNRFHCHFSPRDWQRLINNNWGFRPKRLNFKLFNIQVKEVTDNNGVKTIANNLTSTVQVFGDSDYQLPYVLGSAHEGCLPPFPADVFMIPQYGYLTLNDGSQAVGRSSFYCLEYFPSQMLRTGNNFQFSYEFENVPFHSSYAHSQSLDRLMNPLIDQYLYYLSKTINGSGQNQQTLKFSVAGSSNMAVQGRNYIPGPSYRQQRVSTTVTQNNNSEIAWPGASSWALNGRNSLMNPGPAMASHKEGEDRFFPLSGSLIFGKQGTGRDNVDADKVMITNEEEIKTTNPVATESYGQVATNHQSAQAQAQTGWVQNQGILPGMVWQDRDVYLQGPIWAKIPHTDGNFHPSPLMGGFGMKHPPPQILIKNTPVPADPPTAFNKDKLNSFITQYSTGQVSVEIEWELQKENSKRWNPEIQYTSNLCKSNNVEFAVNTEGVYSEPRPIGTRYLTRNL

SEQ ID NO: 1047 - protein, 736 aa, synthetic construct
MAADGYLPDWLEDNLSEGIREWWALKPGAPQPKANQQHQDNARGLVLPGYKYLGPGNGLDKGEPVNAADAAALEHDKAYDQQLKAGDNPYLKYNHADAEFQERLKEDTSFGGNLGRAVLQAKKRLLEPLGLVEEAAKTAPGKKRPVEQSPQEPDSSAGIGKSGAQPAKKRLNFGQTGDTESVPDPQPIGEPPAAPSGVGSLTMASGGGAPVADNNEGADGVGSSSGNWHCDSQWLGDRVITTSTRTWALPTYNNHLYKQISNSTSGGSSNDNAYFGYSTPWGYFDFNRFHCHFSPRDWQRLINNNWGFRPKRLNFKLFNIQVKEVTDNNGVKTIANNLTSTVQVFGDSDYQLPYVLGSAHEGCLPPFPADVFMIPQYGYLTLNDGSQAVGRSSFYCLEYFPSQMLRTGNNFQFSYEFENVPFHSSYAHSQSLDRLMNPLIDQYLYYLSKTINGSGQNQQTLKFSVAGSSNMAVQGRNYIPGPSYRQQRVSTTVTQNNNSEFAWPRASSWALNGRNSLMNPGPAMASHKEGEDRFFPLSGSLIFGKQGTGRDNVDADKVMITNEEEIKTTNPVATESYGQVATNHQSAQAQAQTGWVQNQGILPGMVWQDRDVYLQGPIWAKIPHTDGNFHPSPLMGGFGMKHPPPQILIKNTPVPADPPTAFNKDKLNSFITQYSTGQVSVEIEWELQKENSKRWNPEIQYTSNLCKSNNVEFAVNTEGVYSEPRPIGTRYLTRNL

SEQ ID NO: 1048 - protein, 736 aa, synthetic construct
MAADGYLPDWLEDNLSEGIREWWALKPGAPQPKANQQHQDNARGLVLPGYKYLGPGNGLDKGEPVNAADAAALEHDKAYDQQLKAGDNPYLKYNHADAEFQERLKEDTSFGGNLGRAVLQAKKRLLEPLGLVEEAAKTAPGKKRPVEQSPQEPDSSAGIGKSGAQPAKKRLNFGQTGDTESVPDPQPIGEPPAAPSGVGSLTMASGGGAPVADNNEGADGVGSSSGNWHCDSQWLGDRVITTSTRTWALPTYNNHLYKQISNSTSGGSSNDNAYFGYSTPWGYFDFNRFHCHFSPRDWQRLINNNWGFRPKRLNFKLFNIQVKEVTDNNGVKTIANNLTSTVQVFGDSDYQLPYVLGSAHEGCLPPFPADVFMIPQYGYLTLNDGSQAVGRSSFYCLEYFPSQMLRTGNNFQFSYEFENVPFHSSYAHSQSLDRLMNPLIDQYLYYLSKTINGSGQNQQTLKFSVAGSSNMAVQGRNYIPGPSYRQQRVSTTVTQNNNSEIAWPRASSWALNGRNSLMNPGPAMASHKEGEDRFFPLSGSLIFGKQGTGRDNVDADKVMITNEEEIKTTNPVATESYGQVATNHQSAQAQAQTGWVQNQGILPGMVWQDRDVYLQGPIWAKIPHTDGNFHPSPLMGGFGMKHPPPQILIKNTPVPADPPTAFNKDKLNSFITQYSTGQVSVEIEWELQKENSKRWNPEIQYTSNLCKSNNVEFAVNTEGVYSEPRPIGTRYLTRNL

SEQ ID NO: 1049 - protein, 736 aa, synthetic construct
MAADGYLPDWLEDNLSEGIREWWALKPGAPQPKANQQHQDNARGLVLPGYKYLGPGNGLDKGEPVNAADAAALEHDKAYDQQLKAGDNPYLKYNHADAEFQERLKEDTSFGGNLGRAVLQAKKRLLEPLGLVEEAAKTAPGKKRPVEQSPQEPDSSAGIGKSGAQPAKKRLNFGQTGDTESVPDPQPIGEPPAAPSGVGSLTMASGGGAPVADNNEGADGVGSSSGNWHCDSQWLGDRVITTSTRTWALPTYNNHLYKQISNSTSGGSSNDNAYFGYSTPWGYFDFNRFHCHFSPRDWQRLINNNWGFRPKRLNFKLFNIQVKEVTDNNGVKTIANNLTSTVQVFADSDYQLPYVLGSAHEGCLPPFPADVFMIPQYGYLTLNDGSQAVGRSSFYCLEYFPSQMLRTGNNFQFSYEFENVPFHSSYAHSQSLDRLMNPLIDQYLYYLSKTINGSGQNQQTLKFSVAGSSNMAVQGRNYIPGPSYRQQRVSTTVTQNNNSEFAWPGASSWALNGRNSLMNPGPAMASHKEGEDRFFPLSGSLIFGKQGTGRDNVDADKVMITNEEEIKTTNPVATESYGQVATNHQSAQAQAQTGWVQNQGILPGMVWQDRDVYLQGPIWAKIPHTDGNFHPSPLMGGFGMKHPPPQILIKNTPVPADPPTAFNKDKLNSFITQYSTGQVSVEIEWELQKENSKRWNPEIQYTSNLYKSNNVEFAVNTEGVYSEPRPIGTRYLTRNL

SEQ ID NO: 1050 - protein, 736 aa, synthetic construct
MAADGYLPDWLEDNLSEGIREWWALKPGAPQPKANQQHQDNARGLVLPGYKYLGPGNGLDKGEPVNAADAAALEHDKAYDQQLKAGDNPYLKYNHADAEFQERLKEDTSFGGNLGRAVLQAKKRLLEPLGLVEEAAKTAPGKKRPVEQSPQEPDSSAGIGKSGAQPAKKRLNFGQTGDTESVPDPQPIGEPPAAPSGVGSLTMASGGGAPVADNNEGADGVGSSSGNWHCDSQWLGDRVITTSTRTWALPTYNNHLYKQISNSTSGGSSNDNAYFGYSTPWGYFDFNRFHCHFSPRDWQRLINNNWGFRPKRLNFKLFNIQVKEVTDNNGVKTIANNLTSTVQVFADSDYQLPYVLGSAHEGCLPPFPADVFMIPQYGYLTLNDGSQAVGRSSFYCLEYFPSQMLRTGNNFQFSYEFENVPFHSSYAHSQSLDRLMNPLIDQYLYYLSKTINGSGQNQQTLKFSVAGSSNMAVQGRNYIPGPSYRQQRVSTTVTQNNNSEIAWPGASSWALNGRNSLMNPGPAMASHKEGEDRFFPLSGSLIFGKQGTGRDNVDADKVMITNEEEIKTTNPVATESYGQVATNHQSAQAQAQTGWVQNQGILPGMVWQDRDVYLQGPIWAKIPHTDGNFHPSPLMGGFGMKHPPPQILIKNTPVPADPPTAFNKDKLNSFITQYSTGQVSVEIEWELQKENSKRWNPEIQYTSNLYKSNNVEFAVNTEGVYSEPRPIGTRYLTRNL

SEQ ID NO: 1051 - protein, 736 aa, synthetic construct
MAADGYLPDWLEDNLSEGIREWWALKPGAPQPKANQQHQDNARGLVLPGYKYLGPGNGLDKGEPVNAADAAALEHDKAYDQQLKAGDNPYLKYNHADAEFQERLKEDTSFGGNLGRAVLQAKKRLLEPLGLVEEAAKTAPGKKRPVEQSPQEPDSSAGIGKSGAQPAKKRLNFGQTGDTESVPDPQPIGEPPAAPSGVGSLTMASGGGAPVADNNEGADGVGSSSGNWHCDSQWLGDRVITTSTRTWALPTYNNHLYKQISNSTSGGSSNDNAYFGYSTPWGYFDFNRFHCHFSPRDWQRLINNNWGFRPKRLNFKLFNIQVKEVTDNNGVKTIANNLTSTVQVFADSDYQLPYVLGSAHEGCLPPFPADVFMIPQYGYLTLNDGSQAVGRSSFYCLEYFPSQMLRTGNNFQFSYEFENVPFHSSYAHSQSLDRLMNPLIDQYLYYLSKTINGSGQNQQTLKFSVAGSSNMAVQGRNYIPGPSYRQQRVSTTVTQNNNSEFAWPRASSWALNGRNSLMNPGPAMASHKEGEDRFFPLSGSLIFGKQGTGRDNVDADKVMITNEEEIKTTNPVATESYGQVATNHQSAQAQAQTGWVQNQGILPGMVWQDRDVYLQGPIWAKIPHTDGNFHPSPLMGGFGMKHPPPQILIKNTPVPADPPTAFNKDKLNSFITQYSTGQVSVEIEWELQKENSKRWNPEIQYTSNLYKSNNVEFAVNTEGVYSEPRPIGTRYLTRNL

SEQ ID NO: 1052 - protein, 736 aa, synthetic construct
MAADGYLPDWLEDNLSEGIREWWALKPGAPQPKANQQHQDNARGLVLPGYKYLGPGNGLDKGEPVNAADAAALEHDKAYDQQLKAGDNPYLKYNHADAEFQERLKEDTSFGGNLGRAVLQAKKRLLEPLGLVEEAAKTAPGKKRPVEQSPQEPDSSAGIGKSGAQPAKKRLNFGQTGDTESVPDPQPIGEPPAAPSGVGSLTMASGGGAPVADNNEGADGVGSSSGNWHCDSQWLGDRVITTSTRTWALPTYNNHLYKQISNSTSGGSSNDNAYFGYSTPWGYFDFNRFHCHFSPRDWQRLINNNWGFRPKRLNFKLFNIQVKEVTDNNGVKTIANNLTSTVQVFADSDYQLPYVLGSAHEGCLPPFPADVFMIPQYGYLTLNDGSQAVGRSSFYCLEYFPSQMLRTGNNFQFSYEFENVPFHSSYAHSQSLDRLMNPLIDQYLYYLSKTINGSGQNQQTLKFSVAGSSNMAVQGRNYIPGPSYRQQRVSTTVTQNNNSEFAWPGASSWALNGRNSLMNPGPAMASHKEGEDRFFPLSGSLIFGKQGTGRDNVDADKVMITNEEEIKTTNPVATESYGQVATNHQSAQAQAQTGWVQNQGILPGMVWQDRDVYLQGPIWAKIPHTDGNFHPSPLMGGFGMKHPPPQILIKNTPVPADPPTAFNKDKLNSFITQYSTGQVSVEIEWELQKENSKRWNPEIQYTSNLCKSNNVEFAVNTEGVYSEPRPIGTRYLTRNL

SEQ ID NO: 1053 - protein, 736 aa, synthetic construct
MAADGYLPDWLEDNLSEGIREWWALKPGAPQPKANQQHQDNARGLVLPGYKYLGPGNGLDKGEPVNAADAAALEHDKAYDQQLKAGDNPYLKYNHADAEFQERLKEDTSFGGNLGRAVLQAKKRLLEPLGLVEEAAKTAPGKKRPVEQSPQEPDSSAGIGKSGAQPAKKRLNFGQTGDTESVPDPQPIGEPPAAPSGVGSLTMASGGGAPVADNNEGADGVGSSSGNWHCDSQWLGDRVITTSTRTWALPTYNNHLYKQISNSTSGGSSNDNAYFGYSTPWGYFDFNRFHCHFSPRDWQRLINNNWGFRPKRLNFKLFNIQVKEVTDNNGVKTIANNLTSTVQVFADSDYQLPYVLGSAHEGCLPPFPADVFMIPQYGYLTLNDGSQAVGRSSFYCLEYFPSQMLRTGNNFQFSYEFENVPFHSSYAHSQSLDRLMNPLIDQYLYYLSKTINGSGQNQQTLKFSVAGSSNMAVQGRNYIPGPSYRQQRVSTTVTQNNNSEIAWPRASSWALNGRNSLMNPGPAMASHKEGEDRFFPLSGSLIFGKQGTGRDNVDADKVMITNEEEIKTTNPVATESYGQVATNHQSAQAQAQTGWVQNQGILPGMVWQDRDVYLQGPIWAKIPHTDGNFHPSPLMGGFGMKHPPPQILIKNTPVPADPPTAFNKDKLNSFITQYSTGQVSVEIEWELQKENSKRWNPEIQYTSNLYKSNNVEFAVNTEGVYSEPRPIGTRYLTRNL

SEQ ID NO: 1054 - protein, 736 aa, synthetic construct
MAADGYLPDWLEDNLSEGIREWWALKPGAPQPKANQQHQDNARGLVLPGYKYLGPGNGLDKGEPVNAADAAALEHDKAYDQQLKAGDNPYLKYNHADAEFQERLKEDTSFGGNLGRAVLQAKKRLLEPLGLVEEAAKTAPGKKRPVEQSPQEPDSSAGIGKSGAQPAKKRLNFGQTGDTESVPDPQPIGEPPAAPSGVGSLTMASGGGAPVADNNEGADGVGSSSGNWHCDSQWLGDRVITTSTRTWALPTYNNHLYKQISNSTSGGSSNDNAYFGYSTPWGYFDFNRFHCHFSPRDWQRLINNNWGFRPKRLNFKLFNIQVKEVTDNNGVKTIANNLTSTVQVFADSDYQLPYVLGSAHEGCLPPFPADVFMIPQYGYLTLNDGSQAVGRSSFYCLEYFPSQMLRTGNNFQFSYEFENVPFHSSYAHSQSLDRLMNPLIDQYLYYLSKTINGSGQNQQTLKFSVAGSSNMAVQGRNYIPGPSYRQQRVSTTVTQNNNSEIAWPGASSWALNGRNSLMNPGPAMASHKEGEDRFFPLSGSLIFGKQGTGRDNVDADKVMITNEEEIKTTNPVATESYGQVATNHQSAQAQAQTGWVQNQGILPGMVWQDRDVYLQGPIWAKIPHTDGNFHPSPLMGGFGMKHPPPQILIKNTPVPADPPTAFNKDKLNSFITQYSTGQVSVEIEWELQKENSKRWNPEIQYTSNLCKSNNVEFAVNTEGVYSEPRPIGTRYLTRNL

SEQ ID NO: 1055 - protein, 736 aa, synthetic construct
MAADGYLPDWLEDNLSEGIREWWALKPGAPQPKANQQHQDNARGLVLPGYKYLGPGNGLDKGEPVNAADAAALEHDKAYDQQLKAGDNPYLKYNHADAEFQERLKEDTSFGGNLGRAVLQAKKRLLEPLGLVEEAAKTAPGKKRPVEQSPQEPDSSAGIGKSGAQPAKKRLNFGQTGDTESVPDPQPIGEPPAAPSGVGSLTMASGGGAPVADNNEGADGVGSSSGNWHCDSQWLGDRVITTSTRTWALPTYNNHLYKQISNSTSGGSSNDNAYFGYSTPWGYFDFNRFHCHFSPRDWQRLINNNWGFRPKRLNFKLFNIQVKEVTDNNGVKTIANNLTSTVQVFADSDYQLPYVLGSAHEGCLPPFPADVFMIPQYGYLTLNDGSQAVGRSSFYCLEYFPSQMLRTGNNFQFSYEFENVPFHSSYAHSQSLDRLMNPLIDQYLYYLSKTINGSGQNQQTLKFSVAGSSNMAVQGRNYIPGPSYRQQRVSTTVTQNNNSEFAWPRASSWALNGRNSLMNPGPAMASHKEGEDRFFPLSGSLIFGKQGTGRDNVDADKVMITNEEEIKTTNPVATESYGQVATNHQSAQAQAQTGWVQNQGILPGMVWQDRDVYLQGPIWAKIPHTDGNFHPSPLMGGFGMKHPPPQILIKNTPVPADPPTAFNKDKLNSFITQYSTGQVSVEIEWELQKENSKRWNPEIQYTSNLCKSNNVEFAVNTEGVYSEPRPIGTRYLTRNL

SEQ ID NO: 1056 - protein, 736 aa, synthetic construct
MAADGYLPDWLEDNLSEGIREWWALKPGAPQPKANQQHQDNARGLVLPGYKYLGPGNGLDKGEPVNAADAAALEHDKAYDQQLKAGDNPYLKYNHADAEFQERLKEDTSFGGNLGRAVLQAKKRLLEPLGLVEEAAKTAPGKKRPVEQSPQEPDSSAGIGKSGAQPAKKRLNFGQTGDTESVPDPQPIGEPPAAPSGVGSLTMASGGGAPVADNNEGADGVGSSSGNWHCDSQWLGDRVITTSTRTWALPTYNNHLYKQISNSTSGGSSNDNAYFGYSTPWGYFDFNRFHCHFSPRDWQRLINNNWGFRPKRLNFKLFNIQVKEVTDNNGVKTIANNLTSTVQVFADSDYQLPYVLGSAHEGCLPPFPADVFMIPQYGYLTLNDGSQAVGRSSFYCLEYFPSQMLRTGNNFQFSYEFENVPFHSSYAHSQSLDRLMNPLIDQYLYYLSKTINGSGQNQQTLKFSVAGSSNMAVQGRNYIPGPSYRQQRVSTTVTQNNNSEIAWPRASSWALNGRNSLMNPGPAMASHKEGEDRFFPLSGSLIFGKQGTGRDNVDADKVMITNEEEIKTTNPVATESYGQVATNHQSAQAQAQTGWVQNQGILPGMVWQDRDVYLQGPIWAKIPHTDGNFHPSPLMGGFGMKHPPPQILIKNTPVPADPPTAFNKDKLNSFITQYSTGQVSVEIEWELQKENSKRWNPEIQYTSNLCKSNNVEFAVNTEGVYSEPRPIGTRYLTRNL

SEQ ID NO: 1057 - protein, 736 aa, synthetic construct
MAADGYLPDWLEDNLSEGIREWWALKPGAPQPKANQQHQDNARGLVLPGYKYLGPGNGLDKGEPVNAADAAALEHDRAYDQQLKAGDNPYLKYNHADAEFQERLKEDTSFGGNLGRAVFQAKKRLLEPLGLVEEAAKTAPGKKRPVEQSPQEPDSSAGIGKSGAQPAKKRLNFGQTGDTESVPDPQPIGEPPAAPSGVGSLTMASGGGAPVADNNEGADGVGSSSGNWHCDSQWLGDRVITTSTRTWALPTYNNHLYKQISNSTSGGSSNDNAYFGYSTPWGYFDFNRFHCHFSPRDWQRLINNNWGFRPKRLNFKLFNIQVKEVTDNNGVKTIANNLTSTVQVFGDSDYQLPYVLGSAHEGCLPPFPADVFMIPQYGYLTLNDGSQAVGRSSFYCLEYFPSQMLRTGNNFQFSYEFENVPFHSSYAHSQSLDRLMNPLIDQYLYYLSKTINGSGQNQQTLKFSVAGPSNMAVQGRNYIPGPSYRQQRVSTTVTQNNNSEFAWPGASSWALNGRNSLMNPGPAMASHKEGEDRFFPLSGSLIFGKQGTGRDNVDADKVMITNEEEIKTTNPVATESYGQVATNHQSAQAQAQTGWVQNQGILPGMVWQDRDVYLQGPIWAKIPHTDGNFHPSPLMGGFGMKHPPPQILIKNTPVPADPPTAFNKDKLNSFITQYSTGQVSVEIEWELQKKNSKRWNPEIQYTSNYYKSNNVEFAVNTEGVYSEPRPIGTRYLTRNL

SEQ ID NO: 1058 - protein, 736 aa, synthetic construct
MAADGYLPDWLEDNLSEGIREWWALKPGAPQPKANQQHQDNARGLVLPGYKYLGPGNGLDKGEPVNAADAAALEHDRAYDQQLKAGDNPYLKYNHADAEFQERLKEDTSFGGNLGRAVFQAKKRLLEPLGLVEEAAKTAPGKKRPVEQSPQEPDSSAGIGKSGAQPAKKRLNFGQTGDTESVPDPQPIGEPPAAPSGVGSLTMASGGGAPVADNNEGADGVGSSSGNWHCDSQWLGDRVITTSTRTWALPTYNNHLYKQISNSTSGGSSNDNAYFGYSTPWGYFDFNRFHCHFSPRDWQRLINNNWGFRPKRLNFKLFNIQVKEVTDNNGVKTIANNLTSTVQVFGDSDYQLPYVLGSAHEGCLPPFPADVFMIPQYGYLTLNDGSQAVGRSSFYCLEYFPSQMLRTGNNFQFSYEFENVPFHSSYAHSQSLDRLMNPLIDQYLYYLSKTINGSGQNQQTLKFSVAGPSNMAVQGRNYIPGPSYRQQRVSTTVTQNNNSEIAWPGASSWALNGRNSLMNPGPAMASHKEGEDRFFPLSGSLIFGKQGTGRDNVDADKVMITNEEEIKTTNPVATESYGQVATNHQSAQAQAQTGWVQNQGILPGMVWQDRDVYLQGPIWAKIPHTDGNFHPSPLMGGFGMKHPPPQILIKNTPVPADPPTAFNKDKLNSFITQYSTGQVSVEIEWELQKKNSKRWNPEIQYTSNYYKSNNVEFAVNTEGVYSEPRPIGTRYLTRNL

SEQ ID NO: 1059 - protein, 736 aa, synthetic construct
MAADGYLPDWLEDNLSEGIREWWALKPGAPQPKANQQHQDNARGLVLPGYKYLGPGNGLDKGEPVNAADAAALEHDRAYDQQLKAGDNPYLKYNHADAEFQERLKEDTSFGGNLGRAVFQAKKRLLEPLGLVEEAAKTAPGKKRPVEQSPQEPDSSAGIGKSGAQPAKKRLNFGQTGDTESVPDPQPIGEPPAAPSGVGSLTMASGGGAPVADNNEGADGVGSSSGNWHCDSQWLGDRVITTSTRTWALPTYNNHLYKQISNSTSGGSSNDNAYFGYSTPWGYFDFNRFHCHFSPRDWQRLINNNWGFRPKRLNFKLFNIQVKEVTDNNGVKTIANNLTSTVQVFGDSDYQLPYVLGSAHEGCLPPFPADVFMIPQYGYLTLNDGSQAVGRSSFYCLEYFPSQMLRTGNNFQFSYEFENVPFHSSYAHSQSLDRLMNPLIDQYLYYLSKTINGSGQNQQTLKFSVAGPSNMAVQGRNYIPGPSYRQQRVSTTVTQNNNSEFAWPRASSWALNGRNSLMNPGPAMASHKEGEDRFFPLSGSLIFGKQGTGRDNVDADKVMITNEEEIKTTNPVATESYGQVATNHQSAQAQAQTGWVQNQGILPGMVWQDRDVYLQGPIWAKIPHTDGNFHPSPLMGGFGMKHPPPQILIKNTPVPADPPTAFNKDKLNSFITQYSTGQVSVEIEWELQKKNSKRWNPEIQYTSNYYKSNNVEFAVNTEGVYSEPRPIGTRYLTRNL

SEQ ID NO: 1060 - protein, 736 aa, synthetic construct
MAADGYLPDWLEDNLSEGIREWWALKPGAPQPKANQQHQDNARGLVLPGYKYLGPGNGLDKGEPVNAADAAALEHDRAYDQQLKAGDNPYLKYNHADAEFQERLKEDTSFGGNLGRAVFQAKKRLLEPLGLVEEAAKTAPGKKRPVEQSPQEPDSSAGIGKSGAQPAKKRLNFGQTGDTESVPDPQPIGEPPAAPSGVGSLTMASGGGAPVADNNEGADGVGSSSGNWHCDSQWLGDRVITTSTRTWALPTYNNHLYKQISNSTSGGSSNDNAYFGYSTPWGYFDFNRFHCHFSPRDWQRLINNNWGFRPKRLNFKLFNIQVKEVTDNNGVKTIANNLTSTVQVFGDSDYQLPYVLGSAHEGCLPPFPADVFMIPQYGYLTLNDGSQAVGRSSFYCLEYFPSQMLRTGNNFQFSYEFENVPFHSSYAHSQSLDRLMNPLIDQYLYYLSKTINGSGQNQQTLKFSVAGPSNMAVQGRNYIPGPSYRQQRVSTTVTQNNNSEFAWPGASSWALNGRNSLMNPGPAMASHKEGEDRFFPLSGSLIFGKQGTGRDNVDADKVMITNEEEIKTTNPVATESYGQVATNHQSAQAQAQTGWVQNQGILPGMVWQDRDVYLQGPIWAKIPHTDGNFHPSPLMGGFGMKHPPPQILIKNTPVPADPPTAFNKDKLNSFITQYSTGQVSVEIEWELQKKNSKRWNPEIQYTSNYCKSNNVEFAVNTEGVYSEPRPIGTRYLTRNL

SEQ ID NO: 1061 - protein, 736 aa, synthetic construct
MAADGYLPDWLEDNLSEGIREWWALKPGAPQPKANQQHQDNARGLVLPGYKYLGPGNGLDKGEPVNAADAAALEHDRAYDQQLKAGDNPYLKYNHADAEFQERLKEDTSFGGNLGRAVFQAKKRLLEPLGLVEEAAKTAPGKKRPVEQSPQEPDSSAGIGKSGAQPAKKRLNFGQTGDTESVPDPQPIGEPPAAPSGVGSLTMASGGGAPVADNNEGADGVGSSSGNWHCDSQWLGDRVITTSTRTWALPTYNNHLYKQISNSTSGGSSNDNAYFGYSTPWGYFDFNRFHCHFSPRDWQRLINNNWGFRPKRLNFKLFNIQVKEVTDNNGVKTIANNLTSTVQVFGDSDYQLPYVLGSAHEGCLPPFPADVFMIPQYGYLTLNDGSQAVGRSSFYCLEYFPSQMLRTGNNFQFSYEFENVPFHSSYAHSQSLDRLMNPLIDQYLYYLSKTINGSGQNQQTLKFSVAGPSNMAVQGRNYIPGPSYRQQRVSTTVTQNNNSEIAWPRASSWALNGRNSLMNPGPAMASHKEGEDRFFPLSGSLIFGKQGTGRDNVDADKVMITNEEEIKTTNPVATESYGQVATNHQSAQAQAQTGWVQNQGILPGMVWQDRDVYLQGPIWAKIPHTDGNFHPSPLMGGFGMKHPPPQILIKNTPVPADPPTAFNKDKLNSFITQYSTGQVSVEIEWELQKKNSKRWNPEIQYTSNYYKSNNVEFAVNTEGVYSEPRPIGTRYLTRNL

SEQ ID NO: 1062 - protein, 736 aa, synthetic construct
MAADGYLPDWLEDNLSEGIREWWALKPGAPQPKANQQHQDNARGLVLPGYKYLGPGNGLDKGEPVNAADAAALEHDRAYDQQLKAGDNPYLKYNHADAEFQERLKEDTSFGGNLGRAVFQAKKRLLEPLGLVEEAAKTAPGKKRPVEQSPQEPDSSAGIGKSGAQPAKKRLNFGQTGDTESVPDPQPIGEPPAAPSGVGSLTMASGGGAPVADNNEGADGVGSSSGNWHCDSQWLGDRVITTSTRTWALPTYNNHLYKQISNSTSGGSSNDNAYFGYSTPWGYFDFNRFHCHFSPRDWQRLINNNWGFRPKRLNFKLFNIQVKEVTDNNGVKTIANNLTSTVQVFGDSDYQLPYVLGSAHEGCLPPFPADVFMIPQYGYLTLNDGSQAVGRSSFYCLEYFPSQMLRTGNNFQFSYEFENVPFHSSYAHSQSLDRLMNPLIDQYLYYLSKTINGSGQNQQTLKFSVAGPSNMAVQGRNYIPGPSYRQQRVSTTVTQNNNSEIAWPGASSWALNGRNSLMNPGPAMASHKEGEDRFFPLSGSLIFGKQGTGRDNVDADKVMITNEEEIKTTNPVATESYGQVATNHQSAQAQAQTGWVQNQGILPGMVWQDRDVYLQGPIWAKIPHTDGNFHPSPLMGGFGMKHPPPQILIKNTPVPADPPTAFNKDKLNSFITQYSTGQVSVEIEWELQKKNSKRWNPEIQYTSNYCKSNNVEFAVNTEGVYSEPRPIGTRYLTRNL

SEQ ID NO: 1063 - protein, 736 aa, synthetic construct
MAADGYLPDWLEDNLSEGIREWWALKPGAPQPKANQQHQDNARGLVLPGYKYLGPGNGLDKGEPVNAADAAALEHDRAYDQQLKAGDNPYLKYNHADAEFQERLKEDTSFGGNLGRAVFQAKKRLLEPLGLVEEAAKTAPGKKRPVEQSPQEPDSSAGIGKSGAQPAKKRLNFGQTGDTESVPDPQPIGEPPAAPSGVGSLTMASGGGAPVADNNEGADGVGSSSGNWHCDSQWLGDRVITTSTRTWALPTYNNHLYKQISNSTSGGSSNDNAYFGYSTPWGYFDFNRFHCHFSPRDWQRLINNNWGFRPKRLNFKLFNIQVKEVTDNNGVKTIANNLTSTVQVFGDSDYQLPYVLGSAHEGCLPPFPADVFMIPQYGYLTLNDGSQAVGRSSFYCLEYFPSQMLRTGNNFQFSYEFENVPFHSSYAHSQSLDRLMNPLIDQYLYYLSKTINGSGQNQQTLKFSVAGPSNMAVQGRNYIPGPSYRQQRVSTTVTQNNNSEFAWPRASSWALNGRNSLMNPGPAMASHKEGEDRFFPLSGSLIFGKQGTGRDNVDADKVMITNEEEIKTTNPVATESYGQVATNHQSAQAQAQTGWVQNQGILPGMVWQDRDVYLQGPIWAKIPHTDGNFHPSPLMGGFGMKHPPPQILIKNTPVPADPPTAFNKDKLNSFITQYSTGQVSVEIEWELQKKNSKRWNPEIQYTSNYCKSNNVEFAVNTEGVYSEPRPIGTRYLTRNL

SEQ ID NO: 1064 - protein, 736 aa, synthetic construct
MAADGYLPDWLEDNLSEGIREWWALKPGAPQPKANQQHQDNARGLVLPGYKYLGPGNGLDKGEPVNAADAAALEHDRAYDQQLKAGDNPYLKYNHADAEFQERLKEDTSFGGNLGRAVFQAKKRLLEPLGLVEEAAKTAPGKKRPVEQSPQEPDSSAGIGKSGAQPAKKRLNFGQTGDTESVPDPQPIGEPPAAPSGVGSLTMASGGGAPVADNNEGADGVGSSSGNWHCDSQWLGDRVITTSTRTWALPTYNNHLYKQISNSTSGGSSNDNAYFGYSTPWGYFDFNRFHCHFSPRDWQRLINNNWGFRPKRLNFKLFNIQVKEVTDNNGVKTIANNLTSTVQVFGDSDYQLPYVLGSAHEGCLPPFPADVFMIPQYGYLTLNDGSQAVGRSSFYCLEYFPSQMLRTGNNFQFSYEFENVPFHSSYAHSQSLDRLMNPLIDQYLYYLSKTINGSGQNQQTLKFSVAGPSNMAVQGRNYIPGPSYRQQRVSTTVTQNNNSEIAWPRASSWALNGRNSLMNPGPAMASHKEGEDRFFPLSGSLIFGKQGTGRDNVDADKVMITNEEEIKTTNPVATESYGQVATNHQSAQAQAQTGWVQNQGILPGMVWQDRDVYLQGPIWAKIPHTDGNFHPSPLMGGFGMKHPPPQILIKNTPVPADPPTAFNKDKLNSFITQYSTGQVSVEIEWELQKKNSKRWNPEIQYTSNYCKSNNVEFAVNTEGVYSEPRPIGTRYLTRNL

SEQ ID NO: 1065 - protein, 736 aa, synthetic construct
MAADGYLPDWLEDNLSEGIREWWALKPGAPQPKANQQHQDNARGLVLPGYKYLGPGNGLDKGEPVNAADAAALEHDRAYDQQLKAGDNPYLKYNHADAEFQERLKEDTSFGGNLGRAVFQAKKRLLEPLGLVEEAAKTAPGKKRPVEQSPQEPDSSAGIGKSGAQPAKKRLNFGQTGDTESVPDPQPIGEPPAAPSGVGSLTMASGGGAPVADNNEGADGVGSSSGNWHCDSQWLGDRVITTSTRTWALPTYNNHLYKQISNSTSGGSSNDNAYFGYSTPWGYFDFNRFHCHFSPRDWQRLINNNWGFRPKRLNFKLFNIQVKEVTDNNGVKTIANNLTSTVQVFTDSDYQLPYVLGSAHEGCLPPFPADVFMIPQYGYLTLNDGSQAVGRSSFYCLEYFPSQMLRTGNNFQFSYEFENVPFHSSYAHSQSLDRLMNPLIDQYLYYLSKTINGSGQNQQTLKFSVAGPSNMAVQGRNYIPGPSYRQQRVSTTVTQNNNSEFAWPGASSWALNGRNSLMNPGPAMASHKEGEDRFFPLSGSLIFGKQGTGRDNVDADKVMITNEEEIKTTNPVATESYGQVATNHQSAQAQAQTGWVQNQGILPGMVWQDRDVYLQGPIWAKIPHTDGNFHPSPLMGGFGMKHPPPQILIKNTPVPADPPTAFNKDKLNSFITQYSTGQVSVEIEWELQKKNSKRWNPEIQYTSNLYKSNNVEFAVNTEGVYSEPRPIGTRYLTRNL

SEQ ID NO: 1066 - protein, 735 aa, synthetic construct
MAADGYLPDWLEDNLSEGIREWWALKPGAPQPKANQQHQDNARGLVLPGYKYLGPGNGLDKGEPVNAADAAALEHDRAYDQQLKAGDNPYLKYNHADAEFQERLKEDTSFGGNLGRAVFQAKKRLLEPLGLVEEAAKTAPGKKRPVEQSPQEPDSSAGIGKSGAQPAKKRLNFGQTGDTESVPDPQPIGEPPAAPSGVGSLTMASGGGAPVADNNEGADGVGSSSGNWHCDSQWLGDRVITTSTRTWALPTYNNHLYKQISNSTSGGSSNDNAYFGYSTPWGYFDFNRFHCHFSPRDWQRLINNNWGFRPKRLNFKLFNIQVKEVTDNNGVKTIANNLTSTVQVFTDSDYQLPYVLGSAHEGCLPPFPADVFMIPQYGYLTLNDGSQAVGRSSFYCLEYFPSQMLRTGNNFQFSYEFENVPFHSSYAHSQSLDRLMNPLIDQYLYYLSKTINGSGQNQQTLKFSVAGPSNMAVQGRNYIPGPSYRQQRVSTTVTQNNNSEIAWPGASSWALNGRNSLMNPGPAMASHKEGEDRFFPLSGSLIFGKQGTGRDNVDADKVMITNEEEIKTTNPVATESYGQVANHQSAQAQAQTGWVQNQGILPGMVWQDRDVYLQGPIWAKIPHTDGNFHPSPLMGGFGMKHPPPQILIKNTPVPADPPTAFNKDKLNSFITQYSTGQVSVEIEWELQKKNSKRWNPEIQYTSNLYKSNNVEFAVNTEGVYSEPRPIGTRYLTRNL

SEQ ID NO: 1067 - protein, 736 aa, synthetic construct
MAADGYLPDWLEDNLSEGIREWWALKPGAPQPKANQQHQDNARGLVLPGYKYLGPGNGLDKGEPVNAADAAALEHDRAYDQQLKAGDNPYLKYNHADAEFQERLKEDTSFGGNLGRAVFQAKKRLLEPLGLVEEAAKTAPGKKRPVEQSPQEPDSSAGIGKSGAQPAKKRLNFGQTGDTESVPDPQPIGEPPAAPSGVGSLTMASGGGAPVADNNEGADGVGSSSGNWHCDSQWLGDRVITTSTRTWALPTYNNHLYKQISNSTSGGSSNDNAYFGYSTPWGYFDFNRFHCHFSPRDWQRLINNNWGFRPKRLNFKLFNIQVKEVTDNNGVKTIANNLTSTVQVFTDSDYQLPYVLGSAHEGCLPPFPADVFMIPQYGYLTLNDGSQAVGRSSFYCLEYFPSQMLRTGNNFQFSYEFENVPFHSSYAHSQSLDRLMNPLIDQYLYYLSKTINGSGQNQQTLKFSVAGPSNMAVQGRNYIPGPSYRQQRVSTTVTQNNNSEFAWPRASSWALNGRNSLMNPGPAMASHKEGEDRFFPLSGSLIFGKQGTGRDNVDADKVMITNEEEIKTTNPVATESYGQVATNHQSAQAQAQTGWVQNQGILPGMVWQDRDVYLQGPIWAKIPHTDGNFHPSPLMGGFGMKHPPPQILIKNTPVPADPPTAFNKDKLNSFITQYSTGQVSVEIEWELQKKNSKRWNPEIQYTSNLYKSNNVEFAVNTEGVYSEPRPIGTRYLTRNL

SEQ ID NO: 1068 - protein, 736 aa, synthetic construct
MAADGYLPDWLEDNLSEGIREWWALKPGAPQPKANQQHQDNARGLVLPGYKYLGPGNGLDKGEPVNAADAAALEHDRAYDQQLKAGDNPYLKYNHADAEFQERLKEDTSFGGNLGRAVFQAKKRLLEPLGLVEEAAKTAPGKKRPVEQSPQEPDSSAGIGKSGAQPAKKRLNFGQTGDTESVPDPQPIGEPPAAPSGVGSLTMASGGGAPVADNNEGADGVGSSSGNWHCDSQWLGDRVITTSTRTWALPTYNNHLYKQISNSTSGGSSNDNAYFGYSTPWGYFDFNRFHCHFSPRDWQRLINNNWGFRPKRLNFKLFNIQVKEVTDNNGVKTIANNLTSTVQVFTDSDYQLPYVLGSAHEGCLPPFPADVFMIPQYGYLTLNDGSQAVGRSSFYCLEYFPSQMLRTGNNFQFSYEFENVPFHSSYAHSQSLDRLMNPLIDQYLYYLSKTINGSGQNQQTLKFSVAGPSNMAVQGRNYIPGPSYRQQRVSTTVTQNNNSEFAWPGASSWALNGRNSLMNPGPAMASHKEGEDRFFPLSGSLIFGKQGTGRDNVDADKVMITNEEEIKTTNPVATESYGQVATNHQSAQAQAQTGWVQNQGILPGMVWQDRDVYLQGPIWAKIPHTDGNFHPSPLMGGFGMKHPPPQILIKNTPVPADPPTAFNKDKLNSFITQYSTGQVSVEIEWELQKKNSKRWNPEIQYTSNLCKSNNVEFAVNTEGVYSEPRPIGTRYLTRNL

SEQ ID NO: 1069 - protein, 736 aa, synthetic construct
MAADGYLPDWLEDNLSEGIREWWALKPGAPQPKANQQHQDNARGLVLPGYKYLGPGNGLDKGEPVNAADAAALEHDRAYDQQLKAGDNPYLKYNHADAEFQERLKEDTSFGGNLGRAVFQAKKRLLEPLGLVEEAAKTAPGKKRPVEQSPQEPDSSAGIGKSGAQPAKKRLNFGQTGDTESVPDPQPIGEPPAAPSGVGSLTMASGGGAPVADNNEGADGVGSSSGNWHCDSQWLGDRVITTSTRTWALPTYNNHLYKQISNSTSGGSSNDNAYFGYSTPWGYFDFNRFHCHFSPRDWQRLINNNWGFRPKRLNFKLFNIQVKEVTDNNGVKTIANNLTSTVQVFTDSDYQLPYVLGSAHEGCLPPFPADVFMIPQYGYLTLNDGSQAVGRSSFYCLEYFPSQMLRTGNNFQFSYEFENVPFHSSYAHSQSLDRLMNPLIDQYLYYLSKTINGSGQNQQTLKFSVAGPSNMAVQGRNYIPGPSYRQQRVSTTVTQNNNSEIAWPRASSWALNGRNSLMNPGPAMASHKEGEDRFFPLSGSLIFGKQGTGRDNVDADKVMITNEEEIKTTNPVATESYGQVATNHQSAQAQAQTGWVQNQGILPGMVWQDRDVYLQGPIWAKIPHTDGNFHPSPLMGGFGMKHPPPQILIKNTPVPADPPTAFNKDKLNSFITQYSTGQVSVEIEWELQKKNSKRWNPEIQYTSNLYKSNNVEFAVNTEGVYSEPRPIGTRYLTRNL

SEQ ID NO: 1070 - protein, 736 aa, synthetic construct
MAADGYLPDWLEDNLSEGIREWWALKPGAPQPKANQQHQDNARGLVLPGYKYLGPGNGLDKGEPVNAADAAALEHDRAYDQQLKAGDNPYLKYNHADAEFQERLKEDTSFGGNLGRAVFQAKKRLLEPLGLVEEAAKTAPGKKRPVEQSPQEPDSSAGIGKSGAQPAKKRLNFGQTGDTESVPDPQPIGEPPAAPSGVGSLTMASGGGAPVADNNEGADGVGSSSGNWHCDSQWLGDRVITTSTRTWALPTYNNHLYKQISNSTSGGSSNDNAYFGYSTPWGYFDFNRFHCHFSPRDWQRLINNNWGFRPKRLNFKLFNIQVKEVTDNNGVKTIANNLTSTVQVFTDSDYQLPYVLGSAHEGCLPPFPADVFMIPQYGYLTLNDGSQAVGRSSFYCLEYFPSQMLRTGNNFQFSYEFENVPFHSSYAHSQSLDRLMNPLIDQYLYYLSKTINGSGQNQQTLKFSVAGPSNMAVQGRNYIPGPSYRQQRVSTTVTQNNNSEIAWPGASSWALNGRNSLMNPGPAMASHKEGEDRFFPLSGSLIFGKQGTGRDNVDADKVMITNEEEIKTTNPVATESYGQVATNHQSAQAQAQTGWVQNQGILPGMVWQDRDVYLQGPIWAKIPHTDGNFHPSPLMGGFGMKHPPPQILIKNTPVPADPPTAFNKDKLNSFITQYSTGQVSVEIEWELQKKNSKRWNPEIQYTSNLCKSNNVEFAVNTEGVYSEPRPIGTRYLTRNL

SEQ ID NO: 1071 - protein, 736 aa, synthetic construct
MAADGYLPDWLEDNLSEGIREWWALKPGAPQPKANQQHQDNARGLVLPGYKYLGPGNGLDKGEPVNAADAAALEHDRAYDQQLKAGDNPYLKYNHADAEFQERLKEDTSFGGNLGRAVFQAKKRLLEPLGLVEEAAKTAPGKKRPVEQSPQEPDSSAGIGKSGAQPAKKRLNFGQTGDTESVPDPQPIGEPPAAPSGVGSLTMASGGGAPVADNNEGADGVGSSSGNWHCDSQWLGDRVITTSTRTWALPTYNNHLYKQISNSTSGGSSNDNAYFGYSTPWGYFDFNRFHCHFSPRDWQRLINNNWGFRPKRLNFKLFNIQVKEVTDNNGVKTIANNLTSTVQVFTDSDYQLPYVLGSAHEGCLPPFPADVFMIPQYGYLTLNDGSQAVGRSSFYCLEYFPSQMLRTGNNFQFSYEFENVPFHSSYAHSQSLDRLMNPLIDQYLYYLSKTINGSGQNQQTLKFSVAGPSNMAVQGRNYIPGPSYRQQRVSTTVTQNNNSEFAWPRASSWALNGRNSLMNPGPAMASHKEGEDRFFPLSGSLIFGKQGTGRDNVDADKVMITNEEEIKTTNPVATESYGQVATNHQSAQAQAQTGWVQNQGILPGMVWQDRDVYLQGPIWAKIPHTDGNFHPSPLMGGFGMKHPPPQILIKNTPVPADPPTAFNKDKLNSFITQYSTGQVSVEIEWELQKKNSKRWNPEIQYTSNLCKSNNVEFAVNTEGVYSEPRPIGTRYLTRNL

SEQ ID NO: 1072 - protein, 736 aa, synthetic construct
MAADGYLPDWLEDNLSEGIREWWALKPGAPQPKANQQHQDNARGLVLPGYKYLGPGNGLDKGEPVNAADAAALEHDRAYDQQLKAGDNPYLKYNHADAEFQERLKEDTSFGGNLGRAVFQAKKRLLEPLGLVEEAAKTAPGKKRPVEQSPQEPDSSAGIGKSGAQPAKKRLNFGQTGDTESVPDPQPIGEPPAAPSGVGSLTMASGGGAPVADNNEGADGVGSSSGNWHCDSQWLGDRVITTSTRTWALPTYNNHLYKQISNSTSGGSSNDNAYFGYSTPWGYFDFNRFHCHFSPRDWQRLINNNWGFRPKRLNFKLFNIQVKEVTDNNGVKTIANNLTSTVQVFTDSDYQLPYVLGSAHEGCLPPFPADVFMIPQYGYLTLNDGSQAVGRSSFYCLEYFPSQMLRTGNNFQFSYEFENVPFHSSYAHSQSLDRLMNPLIDQYLYYLSKTINGSGQNQQTLKFSVAGPSNMAVQGRNYIPGPSYRQQRVSTTVTQNNNSEIAWPRASSWALNGRNSLMNPGPAMASHKEGEDRFFPLSGSLIFGKQGTGRDNVDADKVMITNEEEIKTTNPVATESYGQVATNHQSAQAQAQTGWVQNQGILPGMVWQDRDVYLQGPIWAKIPHTDGNFHPSPLMGGFGMKHPPPQILIKNTPVPADPPTAFNKDKLNSFITQYSTGQVSVEIEWELQKKNSKRWNPEIQYTSNLCKSNNVEFAVNTEGVYSEPRPIGTRYLTRNL

SEQ ID NO: 1073 - protein, 736 aa, synthetic construct
MAADGYLPDWLEDNLSEGIREWWALKPGAPQPKANQQHQDNARGLVLPGYKYLGPGNGLDKGEPVNAADAAALEHDRAYDQQLKAGDNPYLKYNHADAEFQERLKEDTSFGGNLGRAVFQAKKRLLEPLGLVEEAAKTAPGKKRPVEQSPQEPDSSAGIGKSGAQPAKKRLNFGQTGDTESVPDPQPIGEPPAAPSGVGSLTMASGGGAPVADNNEGADGVGSSSGNWHCDSQWLGDRVITTSTRTWALPTYNNHLYKQISNSTSGGSSNDNAYFGYSTPWGYFDFNRFHCHFSPRDWQRLINNNWGFRPKRLNFKLFNIQVKEVTDNNGVKTIANNLTSTVQVFGDSDYQLPYVLGSAHEGCLPPFPADVFMIPQYGYLTLNDGSQAVGRSSFYCLEYFPSQMLRTGNNFQFSYEFENVPFHSSYAHSQSLDRLMNPLIDQYLYYLSKTINGSGQNQQTLKFSVAGPSNMAVQGRNYIPGPSYRQQRVSTTVTQNNNSEFAWPGASSWALNGRNSLMNPGPAMASHKEGEDRFFPLSGSLIFGKQGTGRDNVDADKVMITNEEEIKTTNPVATESYGQVATNHQSAQAQAQTGWVQNQGILPGMVWQDRDVYLQGPIWAKIPHTDGNFHPSPLMGGFGMKHPPPQILIKNTPVPADPPTAFNKDKLNSFITQYSTGQVSVEIEWELQKKNSKRWNPEIQYTSNLYKSNNVEFAVNTEGVYSEPRPIGTRYLTRNL

SEQ ID NO: 1074 - protein, 736 aa, synthetic construct
MAADGYLPDWLEDNLSEGIREWWALKPGAPQPKANQQHQDNARGLVLPGYKYLGPGNGLDKGEPVNAADAAALEHDRAYDQQLKAGDNPYLKYNHADAEFQERLKEDTSFGGNLGRAVFQAKKRLLEPLGLVEEAAKTAPGKKRPVEQSPQEPDSSAGIGKSGAQPAKKRLNFGQTGDTESVPDPQPIGEPPAAPSGVGSLTMASGGGAPVADNNEGADGVGSSSGNWHCDSQWLGDRVITTSTRTWALPTYNNHLYKQISNSTSGGSSNDNAYFGYSTPWGYFDFNRFHCHFSPRDWQRLINNNWGFRPKRLNFKLFNIQVKEVTDNNGVKTIANNLTSTVQVFGDSDYQLPYVLGSAHEGCLPPFPADVFMIPQYGYLTLNDGSQAVGRSSFYCLEYFPSQMLRTGNNFQFSYEFENVPFHSSYAHSQSLDRLMNPLIDQYLYYLSKTINGSGQNQQTLKFSVAGPSNMAVQGRNYIPGPSYRQQRVSTTVTQNNNSEIAWPGASSWALNGRNSLMNPGPAMASHKEGEDRFFPLSGSLIFGKQGTGRDNVDADKVMITNEEEIKTTNPVATESYGQVATNHQSAQAQAQTGWVQNQGILPGMVWQDRDVYLQGPIWAKIPHTDGNFHPSPLMGGFGMKHPPPQILIKNTPVPADPPTAFNKDKLNSFITQYSTGQVSVEIEWELQKKNSKRWNPEIQYTSNLYKSNNVEFAVNTEGVYSEPRPIGTRYLTRNL

SEQ ID NO: 1075 - protein, 736 aa, synthetic construct
MAADGYLPDWLEDNLSEGIREWWALKPGAPQPKANQQHQDNARGLVLPGYKYLGPGNGLDKGEPVNAADAAALEHDRAYDQQLKAGDNPYLKYNHADAEFQERLKEDTSFGGNLGRAVFQAKKRLLEPLGLVEEAAKTAPGKKRPVEQSPQEPDSSAGIGKSGAQPAKKRLNFGQTGDTESVPDPQPIGEPPAAPSGVGSLTMASGGGAPVADNNEGADGVGSSSGNWHCDSQWLGDRVITTSTRTWALPTYNNHLYKQISNSTSGGSSNDNAYFGYSTPWGYFDFNRFHCHFSPRDWQRLINNNWGFRPKRLNFKLFNIQVKEVTDNNGVKTIANNLTSTVQVFGDSDYQLPYVLGSAHEGCLPPFPADVFMIPQYGYLTLNDGSQAVGRSSFYCLEYFPSQMLRTGNNFQFSYEFENVPFHSSYAHSQSLDRLMNPLIDQYLYYLSKTINGSGQNQQTLKFSVAGPSNMAVQGRNYIPGPSYRQQRVSTTVTQNNNSEFAWPRASSWALNGRNSLMNPGPAMASHKEGEDRFFPLSGSLIFGKQGTGRDNVDADKVMITNEEEIKTTNPVATESYGQVATNHQSAQAQAQTGWVQNQGILPGMVWQDRDVYLQGPIWAKIPHTDGNFHPSPLMGGFGMKHPPPQILIKNTPVPADPPTAFNKDKLNSFITQYSTGQVSVEIEWELQKKNSKRWNPEIQYTSNLYKSNNVEFAVNTEGVYSEPRPIGTRYLTRNL

SEQ ID NO: 1076 - protein, 736 aa, synthetic construct
MAADGYLPDWLEDNLSEGIREWWALKPGAPQPKANQQHQDNARGLVLPGYKYLGPGNGLDKGEPVNAADAAALEHDRAYDQQLKAGDNPYLKYNHADAEFQERLKEDTSFGGNLGRAVFQAKKRLLEPLGLVEEAAKTAPGKKRPVEQSPQEPDSSAGIGKSGAQPAKKRLNFGQTGDTESVPDPQPIGEPPAAPSGVGSLTMASGGGAPVADNNEGADGVGSSSGNWHCDSQWLGDRVITTSTRTWALPTYNNHLYKQISNSTSGGSSNDNAYFGYSTPWGYFDFNRFHCHFSPRDWQRLINNNWGFRPKRLNFKLFNIQVKEVTDNNGVKTIANNLTSTVQVFGDSDYQLPYVLGSAHEGCLPPFPADVFMIPQYGYLTLNDGSQAVGRSSFYCLEYFPSQMLRTGNNFQFSYEFENVPFHSSYAHSQSLDRLMNPLIDQYLYYLSKTINGSGQNQQTLKFSVAGPSNMAVQGRNYIPGPSYRQQRVSTTVTQNNNSEFAWPGASSWALNGRNSLMNPGPAMASHKEGEDRFFPLSGSLIFGKQGTGRDNVDADKVMITNEEEIKTTNPVATESYGQVATNHQSAQAQAQTGWVQNQGILPGMVWQDRDVYLQGPIWAKIPHTDGNFHPSPLMGGFGMKHPPPQILIKNTPVPADPPTAFNKDKLNSFITQYSTGQVSVEIEWELQKKNSKRWNPEIQYTSNLCKSNNVEFAVNTEGVYSEPRPIGTRYLTRNL

SEQ ID NO: 1077 - protein, 736 aa, synthetic construct
MAADGYLPDWLEDNLSEGIREWWALKPGAPQPKANQQHQDNARGLVLPGYKYLGPGNGLDKGEPVNAADAAALEHDRAYDQQLKAGDNPYLKYNHADAEFQERLKEDTSFGGNLGRAVFQAKKRLLEPLGLVEEAAKTAPGKKRPVEQSPQEPDSSAGIGKSGAQPAKKRLNFGQTGDTESVPDPQPIGEPPAAPSGVGSLTMASGGGAPVADNNEGADGVGSSSGNWHCDSQWLGDRVITTSTRTWALPTYNNHLYKQISNSTSGGSSNDNAYFGYSTPWGYFDFNRFHCHFSPRDWQRLINNNWGFRPKRLNFKLFNIQVKEVTDNNGVKTIANNLTSTVQVFGDSDYQLPYVLGSAHEGCLPPFPADVFMIPQYGYLTLNDGSQAVGRSSFYCLEYFPSQMLRTGNNFQFSYEFENVPFHSSYAHSQSLDRLMNPLIDQYLYYLSKTINGSGQNQQTLKFSVAGPSNMAVQGRNYIPGPSYRQQRVSTTVTQNNNSEIAWPRASSWALNGRNSLMNPGPAMASHKEGEDRFFPLSGSLIFGKQGTGRDNVDADKVMITNEEEIKTTNPVATESYGQVATNHQSAQAQAQTGWVQNQGILPGMVWQDRDVYLQGPIWAKIPHTDGNFHPSPLMGGFGMKHPPPQILIKNTPVPADPPTAFNKDKLNSFITQYSTGQVSVEIEWELQKKNSKRWNPEIQYTSNLYKSNNVEFAVNTEGVYSEPRPIGTRYLTRNL

SEQ ID NO: 1078 - protein, 736 aa, synthetic construct
MAADGYLPDWLEDNLSEGIREWWALKPGAPQPKANQQHQDNARGLVLPGYKYLGPGNGLDKGEPVNAADAAALEHDRAYDQQLKAGDNPYLKYNHADAEFQERLKEDTSFGGNLGRAVFQAKKRLLEPLGLVEEAAKTAPGKKRPVEQSPQEPDSSAGIGKSGAQPAKKRLNFGQTGDTESVPDPQPIGEPPAAPSGVGSLTMASGGGAPVADNNEGADGVGSSSGNWHCDSQWLGDRVITTSTRTWALPTYNNHLYKQISNSTSGGSSNDNAYFGYSTPWGYFDFNRFHCHFSPRDWQRLINNNWGFRPKRLNFKLFNIQVKEVTDNNGVKTIANNLTSTVQVFGDSDYQLPYVLGSAHEGCLPPFPADVFMIPQYGYLTLNDGSQAVGRSSFYCLEYFPSQMLRTGNNFQFSYEFENVPFHSSYAHSQSLDRLMNPLIDQYLYYLSKTINGSGQNQQTLKFSVAGPSNMAVQGRNYIPGPSYRQQRVSTTVTQNNNSEIAWPGASSWALNGRNSLMNPGPAMASHKEGEDRFFPLSGSLIFGKQGTGRDNVDADKVMITNEEEIKTTNPVATESYGQVATNHQSAQAQAQTGWVQNQGILPGMVWQDRDVYLQGPIWAKIPHTDGNFHPSPLMGGFGMKHPPPQILIKNTPVPADPPTAFNKDKLNSFITQYSTGQVSVEIEWELQKKNSKRWNPEIQYTSNLCKSNNVEFAVNTEGVYSEPRPIGTRYLTRNL

SEQ ID NO: 1079 - protein, 736 aa, synthetic construct
MAADGYLPDWLEDNLSEGIREWWALKPGAPQPKANQQHQDNARGLVLPGYKYLGPGNGLDKGEPVNAADAAALEHDRAYDQQLKAGDNPYLKYNHADAEFQERLKEDTSFGGNLGRAVFQAKKRLLEPLGLVEEAAKTAPGKKRPVEQSPQEPDSSAGIGKSGAQPAKKRLNFGQTGDTESVPDPQPIGEPPAAPSGVGSLTMASGGGAPVADNNEGADGVGSSSGNWHCDSQWLGDRVITTSTRTWALPTYNNHLYKQISNSTSGGSSNDNAYFGYSTPWGYFDFNRFHCHFSPRDWQRLINNNWGFRPKRLNFKLFNIQVKEVTDNNGVKTIANNLTSTVQVFGDSDYQLPYVLGSAHEGCLPPFPADVFMIPQYGYLTLNDGSQAVGRSSFYCLEYFPSQMLRTGNNFQFSYEFENVPFHSSYAHSQSLDRLMNPLIDQYLYYLSKTINGSGQNQQTLKFSVAGPSNMAVQGRNYIPGPSYRQQRVSTTVTQNNNSEFAWPRASSWALNGRNSLMNPGPAMASHKEGEDRFFPLSGSLIFGKQGTGRDNVDADKVMITNEEEIKTTNPVATESYGQVATNHQSAQAQAQTGWVQNQGILPGMVWQDRDVYLQGPIWAKIPHTDGNFHPSPLMGGFGMKHPPPQILIKNTPVPADPPTAFNKDKLNSFITQYSTGQVSVEIEWELQKKNSKRWNPEIQYTSNLCKSNNVEFAVNTEGVYSEPRPIGTRYLTRNL

SEQ ID NO: 1080 - protein, 736 aa, synthetic construct
MAADGYLPDWLEDNLSEGIREWWALKPGAPQPKANQQHQDNARGLVLPGYKYLGPGNGLDKGEPVNAADAAALEHDRAYDQQLKAGDNPYLKYNHADAEFQERLKEDTSFGGNLGRAVFQAKKRLLEPLGLVEEAAKTAPGKKRPVEQSPQEPDSSAGIGKSGAQPAKKRLNFGQTGDTESVPDPQPIGEPPAAPSGVGSLTMASGGGAPVADNNEGADGVGSSSGNWHCDSQWLGDRVITTSTRTWALPTYNNHLYKQISNSTSGGSSNDNAYFGYSTPWGYFDFNRFHCHFSPRDWQRLINNNWGFRPKRLNFKLFNIQVKEVTDNNGVKTIANNLTSTVQVFGDSDYQLPYVLGSAHEGCLPPFPADVFMIPQYGYLTLNDGSQAVGRSSFYCLEYFPSQMLRTGNNFQFSYEFENVPFHSSYAHSQSLDRLMNPLIDQYLYYLSKTINGSGQNQQTLKFSVAGPSNMAVQGRNYIPGPSYRQQRVSTTVTQNNNSEIAWPRASSWALNGRNSLMNPGPAMASHKEGEDRFFPLSGSLIFGKQGTGRDNVDADKVMITNEEEIKTTNPVATESYGQVATNHQSAQAQAQTGWVQNQGILPGMVWQDRDVYLQGPIWAKIPHTDGNFHPSPLMGGFGMKHPPPQILIKNTPVPADPPTAFNKDKLNSFITQYSTGQVSVEIEWELQKKNSKRWNPEIQYTSNLCKSNNVEFAVNTEGVYSEPRPIGTRYLTRNL

SEQ ID NO: 1081 - protein, 736 aa, synthetic construct
MAADGYLPDWLEDNLSEGIREWWALKPGAPQPKANQQHQDNARGLVLPGYKYLGPGNGLDKGEPVNAADAAALEHDRAYDQQLKAGDNPYLKYNHADAEFQERLKEDTSFGGNLGRAVFQAKKRLLEPLGLVEEAAKTAPGKKRPVEQSPQEPDSSAGIGKSGAQPAKKRLNFGQTGDTESVPDPQPIGEPPAAPSGVGSLTMASGGGAPVADNNEGADGVGSSSGNWHCDSQWLGDRVITTSTRTWALPTYNNHLYKQISNSTSGGSSNDNAYFGYSTPWGYFDFNRFHCHFSPRDWQRLINNNWGFRPKRLNFKLFNIQVKEVTDNNGVKTIANNLTSTVQVFADSDYQLPYVLGSAHEGCLPPFPADVFMIPQYGYLTLNDGSQAVGRSSFYCLEYFPSQMLRTGNNFQFSYEFENVPFHSSYAHSQSLDRLMNPLIDQYLYYLSKTINGSGQNQQTLKFSVAGPSNMAVQGRNYIPGPSYRQQRVSTTVTQNNNSEFAWPGASSWALNGRNSLMNPGPAMASHKEGEDRFFPLSGSLIFGKQGTGRDNVDADKVMITNEEEIKTTNPVATESYGQVATNHQSAQAQAQTGWVQNQGILPGMVWQDRDVYLQGPIWAKIPHTDGNFHPSPLMGGFGMKHPPPQILIKNTPVPADPPTAFNKDKLNSFITQYSTGQVSVEIEWELQKKNSKRWNPEIQYTSNLYKSNNVEFAVNTEGVYSEPRPIGTRYLTRNL

SEQ ID NO: 1082 - protein, 736 aa, synthetic construct
MAADGYLPDWLEDNLSEGIREWWALKPGAPQPKANQQHQDNARGLVLPGYKYLGPGNGLDKGEPVNAADAAALEHDRAYDQQLKAGDNPYLKYNHADAEFQERLKEDTSFGGNLGRAVFQAKKRLLEPLGLVEEAAKTAPGKKRPVEQSPQEPDSSAGIGKSGAQPAKKRLNFGQTGDTESVPDPQPIGEPPAAPSGVGSLTMASGGGAPVADNNEGADGVGSSSGNWHCDSQWLGDRVITTSTRTWALPTYNNHLYKQISNSTSGGSSNDNAYFGYSTPWGYFDFNRFHCHFSPRDWQRLINNNWGFRPKRLNFKLFNIQVKEVTDNNGVKTIANNLTSTVQVFADSDYQLPYVLGSAHEGCLPPFPADVFMIPQYGYLTLNDGSQAVGRSSFYCLEYFPSQMLRTGNNFQFSYEFENVPFHSSYAHSQSLDRLMNPLIDQYLYYLSKTINGSGQNQQTLKFSVAGPSNMAVQGRNYIPGPSYRQQRVSTTVTQNNNSEIAWPGASSWALNGRNSLMNPGPAMASHKEGEDRFFPLSGSLIFGKQGTGRDNVDADKVMITNEEEIKTTNPVATESYGQVATNHQSAQAQAQTGWVQNQGILPGMVWQDRDVYLQGPIWAKIPHTDGNFHPSPLMGGFGMKHPPPQILIKNTPVPADPPTAFNKDKLNSFITQYSTGQVSVEIEWELQKKNSKRWNPEIQYTSNLYKSNNVEFAVNTEGVYSEPRPIGTRYLTRNL

SEQ ID NO: 1083 - protein, 736 aa, synthetic construct
MAADGYLPDWLEDNLSEGIREWWALKPGAPQPKANQQHQDNARGLVLPGYKYLGPGNGLDKGEPVNAADAAALEHDRAYDQQLKAGDNPYLKYNHADAEFQERLKEDTSFGGNLGRAVFQAKKRLLEPLGLVEEAAKTAPGKKRPVEQSPQEPDSSAGIGKSGAQPAKKRLNFGQTGDTESVPDPQPIGEPPAAPSGVGSLTMASGGGAPVADNNEGADGVGSSSGNWHCDSQWLGDRVITTSTRTWALPTYNNHLYKQISNSTSGGSSNDNAYFGYSTPWGYFDFNRFHCHFSPRDWQRLINNNWGFRPKRLNFKLFNIQVKEVTDNNGVKTIANNLTSTVQVFADSDYQLPYVLGSAHEGCLPPFPADVFMIPQYGYLTLNDGSQAVGRSSFYCLEYFPSQMLRTGNNFQFSYEFENVPFHSSYAHSQSLDRLMNPLIDQYLYYLSKTINGSGQNQQTLKFSVAGPSNMAVQGRNYIPGPSYRQQRVSTTVTQNNNSEFAWPRASSWALNGRNSLMNPGPAMASHKEGEDRFFPLSGSLIFGKQGTGRDNVDADKVMITNEEEIKTTNPVATESYGQVATNHQSAQAQAQTGWVQNQGILPGMVWQDRDVYLQGPIWAKIPHTDGNFHPSPLMGGFGMKHPPPQILIKNTPVPADPPTAFNKDKLNSFITQYSTGQVSVEIEWELQKKNSKRWNPEIQYTSNLYKSNNVEFAVNTEGVYSEPRPIGTRYLTRNL

SEQ ID NO: 1084 - protein, 736 aa, synthetic construct
MAADGYLPDWLEDNLSEGIREWWALKPGAPQPKANQQHQDNARGLVLPGYKYLGPGNGLDKGEPVNAADAAALEHDRAYDQQLKAGDNPYLKYNHADAEFQERLKEDTSFGGNLGRAVFQAKKRLLEPLGLVEEAAKTAPGKKRPVEQSPQEPDSSAGIGKSGAQPAKKRLNFGQTGDTESVPDPQPIGEPPAAPSGVGSLTMASGGGAPVADNNEGADGVGSSSGNWHCDSQWLGDRVITTSTRTWALPTYNNHLYKQISNSTSGGSSNDNAYFGYSTPWGYFDFNRFHCHFSPRDWQRLINNNWGFRPKRLNFKLFNIQVKEVTDNNGVKTIANNLTSTVQVFADSDYQLPYVLGSAHEGCLPPFPADVFMIPQYGYLTLNDGSQAVGRSSFYCLEYFPSQMLRTGNNFQFSYEFENVPFHSSYAHSQSLDRLMNPLIDQYLYYLSKTINGSGQNQQTLKFSVAGPSNMAVQGRNYIPGPSYRQQRVSTTVTQNNNSEFAWPGASSWALNGRNSLMNPGPAMASHKEGEDRFFPLSGSLIFGKQGTGRDNVDADKVMITNEEEIKTTNPVATESYGQVATNHQSAQAQAQTGWVQNQGILPGMVWQDRDVYLQGPIWAKIPHTDGNFHPSPLMGGFGMKHPPPQILIKNTPVPADPPTAFNKDKLNSFITQYSTGQVSVEIEWELQKKNSKRWNPEIQYTSNLCKSNNVEFAVNTEGVYSEPRPIGTRYLTRNL

SEQ ID NO: 1085 - protein, 736 aa, synthetic construct
MAADGYLPDWLEDNLSEGIREWWALKPGAPQPKANQQHQDNARGLVLPGYKYLGPGNGLDKGEPVNAADAAALEHDRAYDQQLKAGDNPYLKYNHADAEFQERLKEDTSFGGNLGRAVFQAKKRLLEPLGLVEEAAKTAPGKKRPVEQSPQEPDSSAGIGKSGAQPAKKRLNFGQTGDTESVPDPQPIGEPPAAPSGVGSLTMASGGGAPVADNNEGADGVGSSSGNWHCDSQWLGDRVITTSTRTWALPTYNNHLYKQISNSTSGGSSNDNAYFGYSTPWGYFDFNRFHCHFSPRDWQRLINNNWGFRPKRLNFKLFNIQVKEVTDNNGVKTIANNLTSTVQVFADSDYQLPYVLGSAHEGCLPPFPADVFMIPQYGYLTLNDGSQAVGRSSFYCLEYFPSQMLRTGNNFQFSYEFENVPFHSSYAHSQSLDRLMNPLIDQYLYYLSKTINGSGQNQQTLKFSVAGPSNMAVQGRNYIPGPSYRQQRVSTTVTQNNNSEIAWPRASSWALNGRNSLMNPGPAMASHKEGEDRFFPLSGSLIFGKQGTGRDNVDADKVMITNEEEIKTTNPVATESYGQVATNHQSAQAQAQTGWVQNQGILPGMVWQDRDVYLQGPIWAKIPHTDGNFHPSPLMGGFGMKHPPPQILIKNTPVPADPPTAFNKDKLNSFITQYSTGQVSVEIEWELQKKNSKRWNPEIQYTSNLYKSNNVEFAVNTEGVYSEPRPIGTRYLTRNL

SEQ ID NO: 1086 - protein, 736 aa, synthetic construct
MAADGYLPDWLEDNLSEGIREWWALKPGAPQPKANQQHQDNARGLVLPGYKYLGPGNGLDKGEPVNAADAAALEHDRAYDQQLKAGDNPYLKYNHADAEFQERLKEDTSFGGNLGRAVFQAKKRLLEPLGLVEEAAKTAPGKKRPVEQSPQEPDSSAGIGKSGAQPAKKRLNFGQTGDTESVPDPQPIGEPPAAPSGVGSLTMASGGGAPVADNNEGADGVGSSSGNWHCDSQWLGDRVITTSTRTWALPTYNNHLYKQISNSTSGGSSNDNAYFGYSTPWGYFDFNRFHCHFSPRDWQRLINNNWGFRPKRLNFKLFNIQVKEVTDNNGVKTIANNLTSTVQVFADSDYQLPYVLGSAHEGCLPPFPADVFMIPQYGYLTLNDGSQAVGRSSFYCLEYFPSQMLRTGNNFQFSYEFENVPFHSSYAHSQSLDRLMNPLIDQYLYYLSKTINGSGQNQQTLKFSVAGPSNMAVQGRNYIPGPSYRQQRVSTTVTQNNNSEIAWPGASSWALNGRNSLMNPGPAMASHKEGEDRFFPLSGSLIFGKQGTGRDNVDADKVMITNEEEIKTTNPVATESYGQVATNHQSAQAQAQTGWVQNQGILPGMVWQDRDVYLQGPIWAKIPHTDGNFHPSPLMGGFGMKHPPPQILIKNTPVPADPPTAFNKDKLNSFITQYSTGQVSVEIEWELQKKNSKRWNPEIQYTSNLCKSNNVEFAVNTEGVYSEPRPIGTRYLTRNL

SEQ ID NO: 1087 - protein, 736 aa, synthetic construct
MAADGYLPDWLEDNLSEGIREWWALKPGAPQPKANQQHQDNARGLVLPGYKYLGPGNGLDKGEPVNAADAAALEHDRAYDQQLKAGDNPYLKYNHADAEFQERLKEDTSFGGNLGRAVFQAKKRLLEPLGLVEEAAKTAPGKKRPVEQSPQEPDSSAGIGKSGAQPAKKRLNFGQTGDTESVPDPQPIGEPPAAPSGVGSLTMASGGGAPVADNNEGADGVGSSSGNWHCDSQWLGDRVITTSTRTWALPTYNNHLYKQISNSTSGGSSNDNAYFGYSTPWGYFDFNRFHCHFSPRDWQRLINNNWGFRPKRLNFKLFNIQVKEVTDNNGVKTIANNLTSTVQVFADSDYQLPYVLGSAHEGCLPPFPADVFMIPQYGYLTLNDGSQAVGRSSFYCLEYFPSQMLRTGNNFQFSYEFENVPFHSSYAHSQSLDRLMNPLIDQYLYYLSKTINGSGQNQQTLKFSVAGPSNMAVQGRNYIPGPSYRQQRVSTTVTQNNNSEFAWPRASSWALNGRNSLMNPGPAMASHKEGEDRFFPLSGSLIFGKQGTGRDNVDADKVMITNEEEIKTTNPVATESYGQVATNHQSAQAQAQTGWVQNQGILPGMVWQDRDVYLQGPIWAKIPHTDGNFHPSPLMGGFGMKHPPPQILIKNTPVPADPPTAFNKDKLNSFITQYSTGQVSVEIEWELQKKNSKRWNPEIQYTSNLCKSNNVEFAVNTEGVYSEPRPIGTRYLTRNL

SEQ ID NO: 1088 - protein, 736 aa, synthetic construct
MAADGYLPDWLEDNLSEGIREWWALKPGAPQPKANQQHQDNARGLVLPGYKYLGPGNGLDKGEPVNAADAAALEHDRAYDQQLKAGDNPYLKYNHADAEFQERLKEDTSFGGNLGRAVFQAKKRLLEPLGLVEEAAKTAPGKKRPVEQSPQEPDSSAGIGKSGAQPAKKRLNFGQTGDTESVPDPQPIGEPPAAPSGVGSLTMASGGGAPVADNNEGADGVGSSSGNWHCDSQWLGDRVITTSTRTWALPTYNNHLYKQISNSTSGGSSNDNAYFGYSTPWGYFDFNRFHCHFSPRDWQRLINNNWGFRPKRLNFKLFNIQVKEVTDNNGVKTIANNLTSTVQVFADSDYQLPYVLGSAHEGCLPPFPADVFMIPQYGYLTLNDGSQAVGRSSFYCLEYFPSQMLRTGNNFQFSYEFENVPFHSSYAHSQSLDRLMNPLIDQYLYYLSKTINGSGQNQQTLKFSVAGPSNMAVQGRNYIPGPSYRQQRVSTTVTQNNNSEIAWPRASSWALNGRNSLMNPGPAMASHKEGEDRFFPLSGSLIFGKQGTGRDNVDADKVMITNEEEIKTTNPVATESYGQVATNHQSAQAQAQTGWVQNQGILPGMVWQDRDVYLQGPIWAKIPHTDGNFHPSPLMGGFGMKHPPPQILIKNTPVPADPPTAFNKDKLNSFITQYSTGQVSVEIEWELQKKNSKRWNPEIQYTSNLCKSNNVEFAVNTEGVYSEPRPIGTRYLTRNL

SEQ ID NO: 1089 - protein, 736 aa, synthetic construct
MAADGYLPDWLEDNLSEGIREWWALKPGAPQPKANQQHQDNARGLVLPGYKYLGPGNGLDKGEPVNAADAAALEHDKAYDQQLKAGDNPYLKYNHADAEFQERLKEDTSFGGNLGRAVFQAKKRLLEPLGLVEEAAKTAPGKKRPVEQSPQEPDSSAGIGKSGAQPAKKRLNFGQTGDTESVPDPQPIGEPPAAPSGVGSLTMASGGGAPVADNNEGADGVGSSSGNWHCDSQWLGDRVITTSTRTWALPTYNNHLYKQISNSTSGGSSNDNAYFGYSTPWGYFDFNRFHCHFSPRDWQRLINNNWGFRPKRLNFKLFNIQVKEVTDNNGVKTIANNLTSTVQVFGDSDYQLPYVLGSAHEGCLPPFPADVFMIPQYGYLTLNDGSQAVGRSSFYCLEYFPSQMLRTGNNFQFSYEFENVPFHSSYAHSQSLDRLMNPLIDQYLYYLSKTINGSGQNQQTLKFSVAGPSNMAVQGRNYIPGPSYRQQRVSTTVTQNNNSEFAWPGASSWALNGRNSLMNPGPAMASHKEGEDRFFPLSGSLIFGKQGTGRDNVDADKVMITNEEEIKTTNPVATESYGQVATNHQSAQARAQTGWVQNQGILPGMVWQDRDVYLQGPIWAKIPHTDGNFHPSPLMGGFGMKHPPPQILIKNTPVPADPPTAFNKDKLNSFITQYSTGQVSVEIEWELQKENSKRWNPEIQYTSNYYKSNNVEFAVNTEGVYSEPRPIGTRYLTRNL

SEQ ID NO: 1090 - protein, 736 aa, synthetic construct
MAADGYLPDWLEDNLSEGIREWWALKPGAPQPKANQQHQDNARGLVLPGYKYLGPGNGLDKGEPVNAADAAALEHDKAYDQQLKAGDNPYLKYNHADAEFQERLKEDTSFGGNLGRAVFQAKKRLLEPLGLVEEAAKTAPGKKRPVEQSPQEPDSSAGIGKSGAQPAKKRLNFGQTGDTESVPDPQPIGEPPAAPSGVGSLTMASGGGAPVADNNEGADGVGSSSGNWHCDSQWLGDRVITTSTRTWALPTYNNHLYKQISNSTSGGSSNDNAYFGYSTPWGYFDFNRFHCHFSPRDWQRLINNNWGFRPKRLNFKLFNIQVKEVTDNNGVKTIANNLTSTVQVFGDSDYQLPYVLGSAHEGCLPPFPADVFMIPQYGYLTLNDGSQAVGRSSFYCLEYFPSQMLRTGNNFQFSYEFENVPFHSSYAHSQSLDRLMNPLIDQYLYYLSKTINGSGQNQQTLKFSVAGPSNMAVQGRNYIPGPSYRQQRVSTTVTQNNNSEIAWPGASSWALNGRNSLMNPGPAMASHKEGEDRFFPLSGSLIFGKQGTGRDNVDADKVMITNEEEIKTTNPVATESYGQVATNHQSAQARAQTGWVQNQGILPGMVWQDRDVYLQGPIWAKIPHTDGNFHPSPLMGGFGMKHPPPQILIKNTPVPADPPTAFNKDKLNSFITQYSTGQVSVEIEWELQKENSKRWNPEIQYTSNYYKSNNVEFAVNTEGVYSEPRPIGTRYLTRNL

SEQ ID NO: 1091 - protein, 736 aa, synthetic construct
MAADGYLPDWLEDNLSEGIREWWALKPGAPQPKANQQHQDNARGLVLPGYKYLGPGNGLDKGEPVNAADAAALEHDKAYDQQLKAGDNPYLKYNHADAEFQERLKEDTSFGGNLGRAVFQAKKRLLEPLGLVEEAAKTAPGKKRPVEQSPQEPDSSAGIGKSGAQPAKKRLNFGQTGDTESVPDPQPIGEPPAAPSGVGSLTMASGGGAPVADNNEGADGVGSSSGNWHCDSQWLGDRVITTSTRTWALPTYNNHLYKQISNSTSGGSSNDNAYFGYSTPWGYFDFNRFHCHFSPRDWQRLINNNWGFRPKRLNFKLFNIQVKEVTDNNGVKTIANNLTSTVQVFGDSDYQLPYVLGSAHEGCLPPFPADVFMIPQYGYLTLNDGSQAVGRSSFYCLEYFPSQMLRTGNNFQFSYEFENVPFHSSYAHSQSLDRLMNPLIDQYLYYLSKTINGSGQNQQTLKFSVAGPSNMAVQGRNYIPGPSYRQQRVSTTVTQNNNSEFAWPRASSWALNGRNSLMNPGPAMASHKEGEDRFFPLSGSLIFGKQGTGRDNVDADKVMITNEEEIKTTNPVATESYGQVATNHQSAQARAQTGWVQNQGILPGMVWQDRDVYLQGPIWAKIPHTDGNFHPSPLMGGFGMKHPPPQILIKNTPVPADPPTAFNKDKLNSFITQYSTGQVSVEIEWELQKENSKRWNPEIQYTSNYYKSNNVEFAVNTEGVYSEPRPIGTRYLTRNL

SEQ ID NO: 1092 - protein, 736 aa, synthetic construct
MAADGYLPDWLEDNLSEGIREWWALKPGAPQPKANQQHQDNARGLVLPGYKYLGPGNGLDKGEPVNAADAAALEHDKAYDQQLKAGDNPYLKYNHADAEFQERLKEDTSFGGNLGRAVFQAKKRLLEPLGLVEEAAKTAPGKKRPVEQSPQEPDSSAGIGKSGAQPAKKRLNFGQTGDTESVPDPQPIGEPPAAPSGVGSLTMASGGGAPVADNNEGADGVGSSSGNWHCDSQWLGDRVITTSTRTWALPTYNNHLYKQISNSTSGGSSNDNAYFGYSTPWGYFDFNRFHCHFSPRDWQRLINNNWGFRPKRLNFKLFNIQVKEVTDNNGVKTIANNLTSTVQVFGDSDYQLPYVLGSAHEGCLPPFPADVFMIPQYGYLTLNDGSQAVGRSSFYCLEYFPSQMLRTGNNFQFSYEFENVPFHSSYAHSQSLDRLMNPLIDQYLYYLSKTINGSGQNQQTLKFSVAGPSNMAVQGRNYIPGPSYRQQRVSTTVTQNNNSEFAWPGASSWALNGRNSLMNPGPAMASHKEGEDRFFPLSGSLIFGKQGTGRDNVDADKVMITNEEEIKTTNPVATESYGQVATNHQSAQARAQTGWVQNQGILPGMVWQDRDVYLQGPIWAKIPHTDGNFHPSPLMGGFGMKHPPPQILIKNTPVPADPPTAFNKDKLNSFITQYSTGQVSVEIEWELQKENSKRWNPEIQYTSNYCKSNNVEFAVNTEGVYSEPRPIGTRYLTRNL

SEQ ID NO: 1093 - protein, 736 aa, synthetic construct
MAADGYLPDWLEDNLSEGIREWWALKPGAPQPKANQQHQDNARGLVLPGYKYLGPGNGLDKGEPVNAADAAALEHDKAYDQQLKAGDNPYLKYNHADAEFQERLKEDTSFGGNLGRAVFQAKKRLLEPLGLVEEAAKTAPGKKRPVEQSPQEPDSSAGIGKSGAQPAKKRLNFGQTGDTESVPDPQPIGEPPAAPSGVGSLTMASGGGAPVADNNEGADGVGSSSGNWHCDSQWLGDRVITTSTRTWALPTYNNHLYKQISNSTSGGSSNDNAYFGYSTPWGYFDFNRFHCHFSPRDWQRLINNNWGFRPKRLNFKLFNIQVKEVTDNNGVKTIANNLTSTVQVFGDSDYQLPYVLGSAHEGCLPPFPADVFMIPQYGYLTLNDGSQAVGRSSFYCLEYFPSQMLRTGNNFQFSYEFENVPFHSSYAHSQSLDRLMNPLIDQYLYYLSKTINGSGQNQQTLKFSVAGPSNMAVQGRNYIPGPSYRQQRVSTTVTQNNNSEIAWPRASSWALNGRNSLMNPGPAMASHKEGEDRFFPLSGSLIFGKQGTGRDNVDADKVMITNEEEIKTTNPVATESYGQVATNHQSAQARAQTGWVQNQGILPGMVWQDRDVYLQGPIWAKIPHTDGNFHPSPLMGGFGMKHPPPQILIKNTPVPADPPTAFNKDKLNSFITQYSTGQVSVEIEWELQKENSKRWNPEIQYTSNYYKSNNVEFAVNTEGVYSEPRPIGTRYLTRNL

SEQ ID NO: 1094 - protein, 736 aa, synthetic construct
MAADGYLPDWLEDNLSEGIREWWALKPGAPQPKANQQHQDNARGLVLPGYKYLGPGNGLDKGEPVNAADAAALEHDKAYDQQLKAGDNPYLKYNHADAEFQERLKEDTSFGGNLGRAVFQAKKRLLEPLGLVEEAAKTAPGKKRPVEQSPQEPDSSAGIGKSGAQPAKKRLNFGQTGDTESVPDPQPIGEPPAAPSGVGSLTMASGGGAPVADNNEGADGVGSSSGNWHCDSQWLGDRVITTSTRTWALPTYNNHLYKQISNSTSGGSSNDNAYFGYSTPWGYFDFNRFHCHFSPRDWQRLINNNWGFRPKRLNFKLFNIQVKEVTDNNGVKTIANNLTSTVQVFGDSDYQLPYVLGSAHEGCLPPFPADVFMIPQYGYLTLNDGSQAVGRSSFYCLEYFPSQMLRTGNNFQFSYEFENVPFHSSYAHSQSLDRLMNPLIDQYLYYLSKTINGSGQNQQTLKFSVAGPSNMAVQGRNYIPGPSYRQQRVSTTVTQNNNSEIAWPGASSWALNGRNSLMNPGPAMASHKEGEDRFFPLSGSLIFGKQGTGRDNVDADKVMITNEEEIKTTNPVATESYGQVATNHQSAQARAQTGWVQNQGILPGMVWQDRDVYLQGPIWAKIPHTDGNFHPSPLMGGFGMKHPPPQILIKNTPVPADPPTAFNKDKLNSFITQYSTGQVSVEIEWELQKENSKRWNPEIQYTSNYCKSNNVEFAVNTEGVYSEPRPIGTRYLTRNL

SEQ ID NO: 1095 - protein, 736 aa, synthetic construct
MAADGYLPDWLEDNLSEGIREWWALKPGAPQPKANQQHQDNARGLVLPGYKYLGPGNGLDKGEPVNAADAAALEHDKAYDQQLKAGDNPYLKYNHADAEFQERLKEDTSFGGNLGRAVFQAKKRLLEPLGLVEEAAKTAPGKKRPVEQSPQEPDSSAGIGKSGAQPAKKRLNFGQTGDTESVPDPQPIGEPPAAPSGVGSLTMASGGGAPVADNNEGADGVGSSSGNWHCDSQWLGDRVITTSTRTWALPTYNNHLYKQISNSTSGGSSNDNAYFGYSTPWGYFDFNRFHCHFSPRDWQRLINNNWGFRPKRLNFKLFNIQVKEVTDNNGVKTIANNLTSTVQVFGDSDYQLPYVLGSAHEGCLPPFPADVFMIPQYGYLTLNDGSQAVGRSSFYCLEYFPSQMLRTGNNFQFSYEFENVPFHSSYAHSQSLDRLMNPLIDQYLYYLSKTINGSGQNQQTLKFSVAGPSNMAVQGRNYIPGPSYRQQRVSTTVTQNNNSEFAWPRASSWALNGRNSLMNPGPAMASHKEGEDRFFPLSGSLIFGKQGTGRDNVDADKVMITNEEEIKTTNPVATESYGQVATNHQSAQARAQTGWVQNQGILPGMVWQDRDVYLQGPIWAKIPHTDGNFHPSPLMGGFGMKHPPPQILIKNTPVPADPPTAFNKDKLNSFITQYSTGQVSVEIEWELQKENSKRWNPEIQYTSNYCKSNNVEFAVNTEGVYSEPRPIGTRYLTRNL

SEQ ID NO: 1096 - protein, 736 aa, synthetic construct
MAADGYLPDWLEDNLSEGIREWWALKPGAPQPKANQQHQDNARGLVLPGYKYLGPGNGLDKGEPVNAADAAALEHDKAYDQQLKAGDNPYLKYNHADAEFQERLKEDTSFGGNLGRAVFQAKKRLLEPLGLVEEAAKTAPGKKRPVEQSPQEPDSSAGIGKSGAQPAKKRLNFGQTGDTESVPDPQPIGEPPAAPSGVGSLTMASGGGAPVADNNEGADGVGSSSGNWHCDSQWLGDRVITTSTRTWALPTYNNHLYKQISNSTSGGSSNDNAYFGYSTPWGYFDFNRFHCHFSPRDWQRLINNNWGFRPKRLNFKLFNIQVKEVTDNNGVKTIANNLTSTVQVFGDSDYQLPYVLGSAHEGCLPPFPADVFMIPQYGYLTLNDGSQAVGRSSFYCLEYFPSQMLRTGNNFQFSYEFENVPFHSSYAHSQSLDRLMNPLIDQYLYYLSKTINGSGQNQQTLKFSVAGPSNMAVQGRNYIPGPSYRQQRVSTTVTQNNNSEIAWPRASSWALNGRNSLMNPGPAMASHKEGEDRFFPLSGSLIFGKQGTGRDNVDADKVMITNEEEIKTTNPVATESYGQVATNHQSAQARAQTGWVQNQGILPGMVWQDRDVYLQGPIWAKIPHTDGNFHPSPLMGGFGMKHPPPQILIKNTPVPADPPTAFNKDKLNSFITQYSTGQVSVEIEWELQKENSKRWNPEIQYTSNYCKSNNVEFAVNTEGVYSEPRPIGTRYLTRNL

SEQ ID NO: 1097 - protein, 736 aa, synthetic construct
MAADGYLPDWLEDNLSEGIREWWALKPGAPQPKANQQHQDNARGLVLPGYKYLGPGNGLDKGEPVNAADAAALEHDKAYDQQLKAGDNPYLKYNHADAEFQERLKEDTSFGGNLGRAVFQAKKRLLEPLGLVEEAAKTAPGKKRPVEQSPQEPDSSAGIGKSGAQPAKKRLNFGQTGDTESVPDPQPIGEPPAAPSGVGSLTMASGGGAPVADNNEGADGVGSSSGNWHCDSQWLGDRVITTSTRTWALPTYNNHLYKQISNSTSGGSSNDNAYFGYSTPWGYFDFNRFHCHFSPRDWQRLINNNWGFRPKRLNFKLFNIQVKEVTDNNGVKTIANNLTSTVQVFTDSDYQLPYVLGSAHEGCLPPFPADVFMIPQYGYLTLNDGSQAVGRSSFYCLEYFPSQMLRTGNNFQFSYEFENVPFHSSYAHSQSLDRLMNPLIDQYLYYLSKTINGSGQNQQTLKFSVAGPSNMAVQGRNYIPGPSYRQQRVSTTVTQNNNSEFAWPGASSWALNGRNSLMNPGPAMASHKEGEDRFFPLSGSLIFGKQGTGRDNVDADKVMITNEEEIKTTNPVATESYGQVATNHQSAQARAQTGWVQNQGILPGMVWQDRDVYLQGPIWAKIPHTDGNFHPSPLMGGFGMKHPPPQILIKNTPVPADPPTAFNKDKLNSFITQYSTGQVSVEIEWELQKENSKRWNPEIQYTSNLYKSNNVEFAVNTEGVYSEPRPIGTRYLTRNL

SEQ ID NO: 1098 - protein, 736 aa, synthetic construct
MAADGYLPDWLEDNLSEGIREWWALKPGAPQPKANQQHQDNARGLVLPGYKYLGPGNGLDKGEPVNAADAAALEHDKAYDQQLKAGDNPYLKYNHADAEFQERLKEDTSFGGNLGRAVFQAKKRLLEPLGLVEEAAKTAPGKKRPVEQSPQEPDSSAGIGKSGAQPAKKRLNFGQTGDTESVPDPQPIGEPPAAPSGVGSLTMASGGGAPVADNNEGADGVGSSSGNWHCDSQWLGDRVITTSTRTWALPTYNNHLYKQISNSTSGGSSNDNAYFGYSTPWGYFDFNRFHCHFSPRDWQRLINNNWGFRPKRLNFKLFNIQVKEVTDNNGVKTIANNLTSTVQVFTDSDYQLPYVLGSAHEGCLPPFPADVFMIPQYGYLTLNDGSQAVGRSSFYCLEYFPSQMLRTGNNFQFSYEFENVPFHSSYAHSQSLDRLMNPLIDQYLYYLSKTINGSGQNQQTLKFSVAGPSNMAVQGRNYIPGPSYRQQRVSTTVTQNNNSEIAWPGASSWALNGRNSLMNPGPAMASHKEGEDRFFPLSGSLIFGKQGTGRDNVDADKVMITNEEEIKTTNPVATESYGQVATNHQSAQARAQTGWVQNQGILPGMVWQDRDVYLQGPIWAKIPHTDGNFHPSPLMGGFGMKHPPPQILIKNTPVPADPPTAFNKDKLNSFITQYSTGQVSVEIEWELQKENSKRWNPEIQYTSNLYKSNNVEFAVNTEGVYSEPRPIGTRYLTRNL

SEQ ID NO: 1099 - protein, 736 aa, synthetic construct
MAADGYLPDWLEDNLSEGIREWWALKPGAPQPKANQQHQDNARGLVLPGYKYLGPGNGLDKGEPVNAADAAALEHDKAYDQQLKAGDNPYLKYNHADAEFQERLKEDTSFGGNLGRAVFQAKKRLLEPLGLVEEAAKTAPGKKRPVEQSPQEPDSSAGIGKSGAQPAKKRLNFGQTGDTESVPDPQPIGEPPAAPSGVGSLTMASGGGAPVADNNEGADGVGSSSGNWHCDSQWLGDRVITTSTRTWALPTYNNHLYKQISNSTSGGSSNDNAYFGYSTPWGYFDFNRFHCHFSPRDWQRLINNNWGFRPKRLNFKLFNIQVKEVTDNNGVKTIANNLTSTVQVFTDSDYQLPYVLGSAHEGCLPPFPADVFMIPQYGYLTLNDGSQAVGRSSFYCLEYFPSQMLRTGNNFQFSYEFENVPFHSSYAHSQSLDRLMNPLIDQYLYYLSKTINGSGQNQQTLKFSVAGPSNMAVQGRNYIPGPSYRQQRVSTTVTQNNNSEFAWPRASSWALNGRNSLMNPGPAMASHKEGEDRFFPLSGSLIFGKQGTGRDNVDADKVMITNEEEIKTTNPVATESYGQVATNHQSAQARAQTGWVQNQGILPGMVWQDRDVYLQGPIWAKIPHTDGNFHPSPLMGGFGMKHPPPQILIKNTPVPADPPTAFNKDKLNSFITQYSTGQVSVEIEWELQKENSKRWNPEIQYTSNLYKSNNVEFAVNTEGVYSEPRPIGTRYLTRNL

SEQ ID NO: 1100 - protein, 736 aa, synthetic construct
MAADGYLPDWLEDNLSEGIREWWALKPGAPQPKANQQHQDNARGLVLPGYKYLGPGNGLDKGEPVNAADAAALEHDKAYDQQLKAGDNPYLKYNHADAEFQERLKEDTSFGGNLGRAVFQAKKRLLEPLGLVEEAAKTAPGKKRPVEQSPQEPDSSAGIGKSGAQPAKKRLNFGQTGDTESVPDPQPIGEPPAAPSGVGSLTMASGGGAPVADNNEGADGVGSSSGNWHCDSQWLGDRVITTSTRTWALPTYNNHLYKQISNSTSGGSSNDNAYFGYSTPWGYFDFNRFHCHFSPRDWQRLINNNWGFRPKRLNFKLFNIQVKEVTDNNGVKTIANNLTSTVQVFTDSDYQLPYVLGSAHEGCLPPFPADVFMIPQYGYLTLNDGSQAVGRSSFYCLEYFPSQMLRTGNNFQFSYEFENVPFHSSYAHSQSLDRLMNPLIDQYLYYLSKTINGSGQNQQTLKFSVAGPSNMAVQGRNYIPGPSYRQQRVSTTVTQNNNSEFAWPGASSWALNGRNSLMNPGPAMASHKEGEDRFFPLSGSLIFGKQGTGRDNVDADKVMITNEEEIKTTNPVATESYGQVATNHQSAQARAQTGWVQNQGILPGMVWQDRDVYLQGPIWAKIPHTDGNFHPSPLMGGFGMKHPPPQILIKNTPVPADPPTAFNKDKLNSFITQYSTGQVSVEIEWELQKENSKRWNPEIQYTSNLCKSNNVEFAVNTEGVYSEPRPIGTRYLTRNL

SEQ ID NO: 1101 - protein, 736 aa, synthetic construct
MAADGYLPDWLEDNLSEGIREWWALKPGAPQPKANQQHQDNARGLVLPGYKYLGPGNGLDKGEPVNAADAAALEHDKAYDQQLKAGDNPYLKYNHADAEFQERLKEDTSFGGNLGRAVFQAKKRLLEPLGLVEEAAKTAPGKKRPVEQSPQEPDSSAGIGKSGAQPAKKRLNFGQTGDTESVPDPQPIGEPPAAPSGVGSLTMASGGGAPVADNNEGADGVGSSSGNWHCDSQWLGDRVITTSTRTWALPTYNNHLYKQISNSTSGGSSNDNAYFGYSTPWGYFDFNRFHCHFSPRDWQRLINNNWGFRPKRLNFKLFNIQVKEVTDNNGVKTIANNLTSTVQVFTDSDYQLPYVLGSAHEGCLPPFPADVFMIPQYGYLTLNDGSQAVGRSSFYCLEYFPSQMLRTGNNFQFSYEFENVPFHSSYAHSQSLDRLMNPLIDQYLYYLSKTINGSGQNQQTLKFSVAGPSNMAVQGRNYIPGPSYRQQRVSTTVTQNNNSEIAWPRASSWALNGRNSLMNPGPAMASHKEGEDRFFPLSGSLIFGKQGTGRDNVDADKVMITNEEEIKTTNPVATESYGQVATNHQSAQARAQTGWVQNQGILPGMVWQDRDVYLQGPIWAKIPHTDGNFHPSPLMGGFGMKHPPPQILIKNTPVPADPPTAFNKDKLNSFITQYSTGQVSVEIEWELQKENSKRWNPEIQYTSNLYKSNNVEFAVNTEGVYSEPRPIGTRYLTRNL

SEQ ID NO: 1102 - protein, 736 aa, synthetic construct
MAADGYLPDWLEDNLSEGIREWWALKPGAPQPKANQQHQDNARGLVLPGYKYLGPGNGLDKGEPVNAADAAALEHDKAYDQQLKAGDNPYLKYNHADAEFQERLKEDTSFGGNLGRAVFQAKKRLLEPLGLVEEAAKTAPGKKRPVEQSPQEPDSSAGIGKSGAQPAKKRLNFGQTGDTESVPDPQPIGEPPAAPSGVGSLTMASGGGAPVADNNEGADGVGSSSGNWHCDSQWLGDRVITTSTRTWALPTYNNHLYKQISNSTSGGSSNDNAYFGYSTPWGYFDFNRFHCHFSPRDWQRLINNNWGFRPKRLNFKLFNIQVKEVTDNNGVKTIANNLTSTVQVFTDSDYQLPYVLGSAHEGCLPPFPADVFMIPQYGYLTLNDGSQAVGRSSFYCLEYFPSQMLRTGNNFQFSYEFENVPFHSSYAHSQSLDRLMNPLIDQYLYYLSKTINGSGQNQQTLKFSVAGPSNMAVQGRNYIPGPSYRQQRVSTTVTQNNNSEIAWPGASSWALNGRNSLMNPGPAMASHKEGEDRFFPLSGSLIFGKQGTGRDNVDADKVMITNEEEIKTTNPVATESYGQVATNHQSAQARAQTGWVQNQGILPGMVWQDRDVYLQGPIWAKIPHTDGNFHPSPLMGGFGMKHPPPQILIKNTPVPADPPTAFNKDKLNSFITQYSTGQVSVEIEWELQKENSKRWNPEIQYTSNLCKSNNVEFAVNTEGVYSEPRPIGTRYLTRNL

SEQ ID NO: 1103 - protein, 736 aa, synthetic construct
MAADGYLPDWLEDNLSEGIREWWALKPGAPQPKANQQHQDNARGLVLPGYKYLGPGNGLDKGEPVNAADAAALEHDKAYDQQLKAGDNPYLKYNHADAEFQERLKEDTSFGGNLGRAVFQAKKRLLEPLGLVEEAAKTAPGKKRPVEQSPQEPDSSAGIGKSGAQPAKKRLNFGQTGDTESVPDPQPIGEPPAAPSGVGSLTMASGGGAPVADNNEGADGVGSSSGNWHCDSQWLGDRVITTSTRTWALPTYNNHLYKQISNSTSGGSSNDNAYFGYSTPWGYFDFNRFHCHFSPRDWQRLINNNWGFRPKRLNFKLFNIQVKEVTDNNGVKTIANNLTSTVQVFTDSDYQLPYVLGSAHEGCLPPFPADVFMIPQYGYLTLNDGSQAVGRSSFYCLEYFPSQMLRTGNNFQFSYEFENVPFHSSYAHSQSLDRLMNPLIDQYLYYLSKTINGSGQNQQTLKFSVAGPSNMAVQGRNYIPGPSYRQQRVSTTVTQNNNSEFAWPRASSWALNGRNSLMNPGPAMASHKEGEDRFFPLSGSLIFGKQGTGRDNVDADKVMITNEEEIKTTNPVATESYGQVATNHQSAQARAQTGWVQNQGILPGMVWQDRDVYLQGPIWAKIPHTDGNFHPSPLMGGFGMKHPPPQILIKNTPVPADPPTAFNKDKLNSFITQYSTGQVSVEIEWELQKENSKRWNPEIQYTSNLCKSNNVEFAVNTEGVYSEPRPIGTRYLTRNL

SEQ ID NO: 1104 - protein, 736 aa, synthetic construct
MAADGYLPDWLEDNLSEGIREWWALKPGAPQPKANQQHQDNARGLVLPGYKYLGPGNGLDKGEPVNAADAAALEHDKAYDQQLKAGDNPYLKYNHADAEFQERLKEDTSFGGNLGRAVFQAKKRLLEPLGLVEEAAKTAPGKKRPVEQSPQEPDSSAGIGKSGAQPAKKRLNFGQTGDTESVPDPQPIGEPPAAPSGVGSLTMASGGGAPVADNNEGADGVGSSSGNWHCDSQWLGDRVITTSTRTWALPTYNNHLYKQISNSTSGGSSNDNAYFGYSTPWGYFDFNRFHCHFSPRDWQRLINNNWGFRPKRLNFKLFNIQVKEVTDNNGVKTIANNLTSTVQVFTDSDYQLPYVLGSAHEGCLPPFPADVFMIPQYGYLTLNDGSQAVGRSSFYCLEYFPSQMLRTGNNFQFSYEFENVPFHSSYAHSQSLDRLMNPLIDQYLYYLSKTINGSGQNQQTLKFSVAGPSNMAVQGRNYIPGPSYRQQRVSTTVTQNNNSEIAWPRASSWALNGRNSLMNPGPAMASHKEGEDRFFPLSGSLIFGKQGTGRDNVDADKVMITNEEEIKTTNPVATESYGQVATNHQSAQARAQTGWVQNQGILPGMVWQDRDVYLQGPIWAKIPHTDGNFHPSPLMGGFGMKHPPPQILIKNTPVPADPPTAFNKDKLNSFITQYSTGQVSVEIEWELQKENSKRWNPEIQYTSNLCKSNNVEFAVNTEGVYSEPRPIGTRYLTRNL

SEQ ID NO: 1105 - protein, 736 aa, synthetic construct
MAADGYLPDWLEDNLSEGIREWWALKPGAPQPKANQQHQDNARGLVLPGYKYLGPGNGLDKGEPVNAADAAALEHDKAYDQQLKAGDNPYLKYNHADAEFQERLKEDTSFGGNLGRAVFQAKKRLLEPLGLVEEAAKTAPGKKRPVEQSPQEPDSSAGIGKSGAQPAKKRLNFGQTGDTESVPDPQPIGEPPAAPSGVGSLTMASGGGAPVADNNEGADGVGSSSGNWHCDSQWLGDRVITTSTRTWALPTYNNHLYKQISNSTSGGSSNDNAYFGYSTPWGYFDFNRFHCHFSPRDWQRLINNNWGFRPKRLNFKLFNIQVKEVTDNNGVKTIANNLTSTVQVFGDSDYQLPYVLGSAHEGCLPPFPADVFMIPQYGYLTLNDGSQAVGRSSFYCLEYFPSQMLRTGNNFQFSYEFENVPFHSSYAHSQSLDRLMNPLIDQYLYYLSKTINGSGQNQQTLKFSVAGPSNMAVQGRNYIPGPSYRQQRVSTTVTQNNNSEFAWPGASSWALNGRNSLMNPGPAMASHKEGEDRFFPLSGSLIFGKQGTGRDNVDADKVMITNEEEIKTTNPVATESYGQVATNHQSAQARAQTGWVQNQGILPGMVWQDRDVYLQGPIWAKIPHTDGNFHPSPLMGGFGMKHPPPQILIKNTPVPADPPTAFNKDKLNSFITQYSTGQVSVEIEWELQKENSKRWNPEIQYTSNLYKSNNVEFAVNTEGVYSEPRPIGTRYLTRNL

SEQ ID NO: 1106 - protein, 736 aa, synthetic construct
MAADGYLPDWLEDNLSEGIREWWALKPGAPQPKANQQHQDNARGLVLPGYKYLGPGNGLDKGEPVNAADAAALEHDKAYDQQLKAGDNPYLKYNHADAEFQERLKEDTSFGGNLGRAVFQAKKRLLEPLGLVEEAAKTAPGKKRPVEQSPQEPDSSAGIGKSGAQPAKKRLNFGQTGDTESVPDPQPIGEPPAAPSGVGSLTMASGGGAPVADNNEGADGVGSSSGNWHCDSQWLGDRVITTSTRTWALPTYNNHLYKQISNSTSGGSSNDNAYFGYSTPWGYFDFNRFHCHFSPRDWQRLINNNWGFRPKRLNFKLFNIQVKEVTDNNGVKTIANNLTSTVQVFGDSDYQLPYVLGSAHEGCLPPFPADVFMIPQYGYLTLNDGSQAVGRSSFYCLEYFPSQMLRTGNNFQFSYEFENVPFHSSYAHSQSLDRLMNPLIDQYLYYLSKTINGSGQNQQTLKFSVAGPSNMAVQGRNYIPGPSYRQQRVSTTVTQNNNSEIAWPGASSWALNGRNSLMNPGPAMASHKEGEDRFFPLSGSLIFGKQGTGRDNVDADKVMITNEEEIKTTNPVATESYGQVATNHQSAQARAQTGWVQNQGILPGMVWQDRDVYLQGPIWAKIPHTDGNFHPSPLMGGFGMKHPPPQILIKNTPVPADPPTAFNKDKLNSFITQYSTGQVSVEIEWELQKENSKRWNPEIQYTSNLYKSNNVEFAVNTEGVYSEPRPIGTRYLTRNL

SEQ ID NO: 1107 - protein, 736 aa, synthetic construct
MAADGYLPDWLEDNLSEGIREWWALKPGAPQPKANQQHQDNARGLVLPGYKYLGPGNGLDKGEPVNAADAAALEHDKAYDQQLKAGDNPYLKYNHADAEFQERLKEDTSFGGNLGRAVFQAKKRLLEPLGLVEEAAKTAPGKKRPVEQSPQEPDSSAGIGKSGAQPAKKRLNFGQTGDTESVPDPQPIGEPPAAPSGVGSLTMASGGGAPVADNNEGADGVGSSSGNWHCDSQWLGDRVITTSTRTWALPTYNNHLYKQISNSTSGGSSNDNAYFGYSTPWGYFDFNRFHCHFSPRDWQRLINNNWGFRPKRLNFKLFNIQVKEVTDNNGVKTIANNLTSTVQVFGDSDYQLPYVLGSAHEGCLPPFPADVFMIPQYGYLTLNDGSQAVGRSSFYCLEYFPSQMLRTGNNFQFSYEFENVPFHSSYAHSQSLDRLMNPLIDQYLYYLSKTINGSGQNQQTLKFSVAGPSNMAVQGRNYIPGPSYRQQRVSTTVTQNNNSEFAWPRASSWALNGRNSLMNPGPAMASHKEGEDRFFPLSGSLIFGKQGTGRDNVDADKVMITNEEEIKTTNPVATESYGQVATNHQSAQARAQTGWVQNQGILPGMVWQDRDVYLQGPIWAKIPHTDGNFHPSPLMGGFGMKHPPPQILIKNTPVPADPPTAFNKDKLNSFITQYSTGQVSVEIEWELQKENSKRWNPEIQYTSNLYKSNNVEFAVNTEGVYSEPRPIGTRYLTRNL

SEQ ID NO: 1108 - protein, 736 aa, synthetic construct
MAADGYLPDWLEDNLSEGIREWWALKPGAPQPKANQQHQDNARGLVLPGYKYLGPGNGLDKGEPVNAADAAALEHDKAYDQQLKAGDNPYLKYNHADAEFQERLKEDTSFGGNLGRAVFQAKKRLLEPLGLVEEAAKTAPGKKRPVEQSPQEPDSSAGIGKSGAQPAKKRLNFGQTGDTESVPDPQPIGEPPAAPSGVGSLTMASGGGAPVADNNEGADGVGSSSGNWHCDSQWLGDRVITTSTRTWALPTYNNHLYKQISNSTSGGSSNDNAYFGYSTPWGYFDFNRFHCHFSPRDWQRLINNNWGFRPKRLNFKLFNIQVKEVTDNNGVKTIANNLTSTVQVFGDSDYQLPYVLGSAHEGCLPPFPADVFMIPQYGYLTLNDGSQAVGRSSFYCLEYFPSQMLRTGNNFQFSYEFENVPFHSSYAHSQSLDRLMNPLIDQYLYYLSKTINGSGQNQQTLKFSVAGPSNMAVQGRNYIPGPSYRQQRVSTTVTQNNNSEFAWPGASSWALNGRNSLMNPGPAMASHKEGEDRFFPLSGSLIFGKQGTGRDNVDADKVMITNEEEIKTTNPVATESYGQVATNHQSAQARAQTGWVQNQGILPGMVWQDRDVYLQGPIWAKIPHTDGNFHPSPLMGGFGMKHPPPQILIKNTPVPADPPTAFNKDKLNSFITQYSTGQVSVEIEWELQKENSKRWNPEIQYTSNLCKSNNVEFAVNTEGVYSEPRPIGTRYLTRNL

SEQ ID NO: 1109 - protein, 736 aa, synthetic construct
MAADGYLPDWLEDNLSEGIREWWALKPGAPQPKANQQHQDNARGLVLPGYKYLGPGNGLDKGEPVNAADAAALEHDKAYDQQLKAGDNPYLKYNHADAEFQERLKEDTSFGGNLGRAVFQAKKRLLEPLGLVEEAAKTAPGKKRPVEQSPQEPDSSAGIGKSGAQPAKKRLNFGQTGDTESVPDPQPIGEPPAAPSGVGSLTMASGGGAPVADNNEGADGVGSSSGNWHCDSQWLGDRVITTSTRTWALPTYNNHLYKQISNSTSGGSSNDNAYFGYSTPWGYFDFNRFHCHFSPRDWQRLINNNWGFRPKRLNFKLFNIQVKEVTDNNGVKTIANNLTSTVQVFGDSDYQLPYVLGSAHEGCLPPFPADVFMIPQYGYLTLNDGSQAVGRSSFYCLEYFPSQMLRTGNNFQFSYEFENVPFHSSYAHSQSLDRLMNPLIDQYLYYLSKTINGSGQNQQTLKFSVAGPSNMAVQGRNYIPGPSYRQQRVSTTVTQNNNSEIAWPRASSWALNGRNSLMNPGPAMASHKEGEDRFFPLSGSLIFGKQGTGRDNVDADKVMITNEEEIKTTNPVATESYGQVATNHQSAQARAQTGWVQNQGILPGMVWQDRDVYLQGPIWAKIPHTDGNFHPSPLMGGFGMKHPPPQILIKNTPVPADPPTAFNKDKLNSFITQYSTGQVSVEIEWELQKENSKRWNPEIQYTSNLYKSNNVEFAVNTEGVYSEPRPIGTRYLTRNL

SEQ ID NO: 1110 - protein, 736 aa, synthetic construct
MAADGYLPDWLEDNLSEGIREWWALKPGAPQPKANQQHQDNARGLVLPGYKYLGPGNGLDKGEPVNAADAAALEHDKAYDQQLKAGDNPYLKYNHADAEFQERLKEDTSFGGNLGRAVFQAKKRLLEPLGLVEEAAKTAPGKKRPVEQSPQEPDSSAGIGKSGAQPAKKRLNFGQTGDTESVPDPQPIGEPPAAPSGVGSLTMASGGGAPVADNNEGADGVGSSSGNWHCDSQWLGDRVITTSTRTWALPTYNNHLYKQISNSTSGGSSNDNAYFGYSTPWGYFDFNRFHCHFSPRDWQRLINNNWGFRPKRLNFKLFNIQVKEVTDNNGVKTIANNLTSTVQVFGDSDYQLPYVLGSAHEGCLPPFPADVFMIPQYGYLTLNDGSQAVGRSSFYCLEYFPSQMLRTGNNFQFSYEFENVPFHSSYAHSQSLDRLMNPLIDQYLYYLSKTINGSGQNQQTLKFSVAGPSNMAVQGRNYIPGPSYRQQRVSTTVTQNNNSEIAWPGASSWALNGRNSLMNPGPAMASHKEGEDRFFPLSGSLIFGKQGTGRDNVDADKVMITNEEEIKTTNPVATESYGQVATNHQSAQARAQTGWVQNQGILPGMVWQDRDVYLQGPIWAKIPHTDGNFHPSPLMGGFGMKHPPPQILIKNTPVPADPPTAFNKDKLNSFITQYSTGQVSVEIEWELQKENSKRWNPEIQYTSNLCKSNNVEFAVNTEGVYSEPRPIGTRYLTRNL

SEQ ID NO: 1111 - protein, 736 aa, synthetic construct
MAADGYLPDWLEDNLSEGIREWWALKPGAPQPKANQQHQDNARGLVLPGYKYLGPGNGLDKGEPVNAADAAALEHDKAYDQQLKAGDNPYLKYNHADAEFQERLKEDTSFGGNLGRAVFQAKKRLLEPLGLVEEAAKTAPGKKRPVEQSPQEPDSSAGIGKSGAQPAKKRLNFGQTGDTESVPDPQPIGEPPAAPSGVGSLTMASGGGAPVADNNEGADGVGSSSGNWHCDSQWLGDRVITTSTRTWALPTYNNHLYKQISNSTSGGSSNDNAYFGYSTPWGYFDFNRFHCHFSPRDWQRLINNNWGFRPKRLNFKLFNIQVKEVTDNNGVKTIANNLTSTVQVFGDSDYQLPYVLGSAHEGCLPPFPADVFMIPQYGYLTLNDGSQAVGRSSFYCLEYFPSQMLRTGNNFQFSYEFENVPFHSSYAHSQSLDRLMNPLIDQYLYYLSKTINGSGQNQQTLKFSVAGPSNMAVQGRNYIPGPSYRQQRVSTTVTQNNNSEFAWPRASSWALNGRNSLMNPGPAMASHKEGEDRFFPLSGSLIFGKQGTGRDNVDADKVMITNEEEIKTTNPVATESYGQVATNHQSAQARAQTGWVQNQGILPGMVWQDRDVYLQGPIWAKIPHTDGNFHPSPLMGGFGMKHPPPQILIKNTPVPADPPTAFNKDKLNSFITQYSTGQVSVEIEWELQKENSKRWNPEIQYTSNLCKSNNVEFAVNTEGVYSEPRPIGTRYLTRNL

SEQ ID NO: 1112 - protein, 736 aa, synthetic construct
MAADGYLPDWLEDNLSEGIREWWALKPGAPQPKANQQHQDNARGLVLPGYKYLGPGNGLDKGEPVNAADAAALEHDKAYDQQLKAGDNPYLKYNHADAEFQERLKEDTSFGGNLGRAVFQAKKRLLEPLGLVEEAAKTAPGKKRPVEQSPQEPDSSAGIGKSGAQPAKKRLNFGQTGDTESVPDPQPIGEPPAAPSGVGSLTMASGGGAPVADNNEGADGVGSSSGNWHCDSQWLGDRVITTSTRTWALPTYNNHLYKQISNSTSGGSSNDNAYFGYSTPWGYFDFNRFHCHFSPRDWQRLINNNWGFRPKRLNFKLFNIQVKEVTDNNGVKTIANNLTSTVQVFGDSDYQLPYVLGSAHEGCLPPFPADVFMIPQYGYLTLNDGSQAVGRSSFYCLEYFPSQMLRTGNNFQFSYEFENVPFHSSYAHSQSLDRLMNPLIDQYLYYLSKTINGSGQNQQTLKFSVAGPSNMAVQGRNYIPGPSYRQQRVSTTVTQNNNSEIAWPRASSWALNGRNSLMNPGPAMASHKEGEDRFFPLSGSLIFGKQGTGRDNVDADKVMITNEEEIKTTNPVATESYGQVATNHQSAQARAQTGWVQNQGILPGMVWQDRDVYLQGPIWAKIPHTDGNFHPSPLMGGFGMKHPPPQILIKNTPVPADPPTAFNKDKLNSFITQYSTGQVSVEIEWELQKENSKRWNPEIQYTSNLCKSNNVEFAVNTEGVYSEPRPIGTRYLTRNL

SEQ ID NO: 1113 - protein, 736 aa, synthetic construct
MAADGYLPDWLEDNLSEGIREWWALKPGAPQPKANQQHQDNARGLVLPGYKYLGPGNGLDKGEPVNAADAAALEHDKAYDQQLKAGDNPYLKYNHADAEFQERLKEDTSFGGNLGRAVFQAKKRLLEPLGLVEEAAKTAPGKKRPVEQSPQEPDSSAGIGKSGAQPAKKRLNFGQTGDTESVPDPQPIGEPPAAPSGVGSLTMASGGGAPVADNNEGADGVGSSSGNWHCDSQWLGDRVITTSTRTWALPTYNNHLYKQISNSTSGGSSNDNAYFGYSTPWGYFDFNRFHCHFSPRDWQRLINNNWGFRPKRLNFKLFNIQVKEVTDNNGVKTIANNLTSTVQVFADSDYQLPYVLGSAHEGCLPPFPADVFMIPQYGYLTLNDGSQAVGRSSFYCLEYFPSQMLRTGNNFQFSYEFENVPFHSSYAHSQSLDRLMNPLIDQYLYYLSKTINGSGQNQQTLKFSVAGPSNMAVQGRNYIPGPSYRQQRVSTTVTQNNNSEFAWPGASSWALNGRNSLMNPGPAMASHKEGEDRFFPLSGSLIFGKQGTGRDNVDADKVMITNEEEIKTTNPVATESYGQVATNHQSAQARAQTGWVQNQGILPGMVWQDRDVYLQGPIWAKIPHTDGNFHPSPLMGGFGMKHPPPQILIKNTPVPADPPTAFNKDKLNSFITQYSTGQVSVEIEWELQKENSKRWNPEIQYTSNLYKSNNVEFAVNTEGVYSEPRPIGTRYLTRNL

SEQ ID NO: 1114 - protein, 736 aa, synthetic construct
MAADGYLPDWLEDNLSEGIREWWALKPGAPQPKANQQHQDNARGLVLPGYKYLGPGNGLDKGEPVNAADAAALEHDKAYDQQLKAGDNPYLKYNHADAEFQERLKEDTSFGGNLGRAVFQAKKRLLEPLGLVEEAAKTAPGKKRPVEQSPQEPDSSAGIGKSGAQPAKKRLNFGQTGDTESVPDPQPIGEPPAAPSGVGSLTMASGGGAPVADNNEGADGVGSSSGNWHCDSQWLGDRVITTSTRTWALPTYNNHLYKQISNSTSGGSSNDNAYFGYSTPWGYFDFNRFHCHFSPRDWQRLINNNWGFRPKRLNFKLFNIQVKEVTDNNGVKTIANNLTSTVQVFADSDYQLPYVLGSAHEGCLPPFPADVFMIPQYGYLTLNDGSQAVGRSSFYCLEYFPSQMLRTGNNFQFSYEFENVPFHSSYAHSQSLDRLMNPLIDQYLYYLSKTINGSGQNQQTLKFSVAGPSNMAVQGRNYIPGPSYRQQRVSTTVTQNNNSEIAWPGASSWALNGRNSLMNPGPAMASHKEGEDRFFPLSGSLIFGKQGTGRDNVDADKVMITNEEEIKTTNPVATESYGQVATNHQSAQARAQTGWVQNQGILPGMVWQDRDVYLQGPIWAKIPHTDGNFHPSPLMGGFGMKHPPPQILIKNTPVPADPPTAFNKDKLNSFITQYSTGQVSVEIEWELQKENSKRWNPEIQYTSNLYKSNNVEFAVNTEGVYSEPRPIGTRYLTRNL

SEQ ID NO: 1115 - protein, 736 aa, synthetic construct
MAADGYLPDWLEDNLSEGIREWWALKPGAPQPKANQQHQDNARGLVLPGYKYLGPGNGLDKGEPVNAADAAALEHDKAYDQQLKAGDNPYLKYNHADAEFQERLKEDTSFGGNLGRAVFQAKKRLLEPLGLVEEAAKTAPGKKRPVEQSPQEPDSSAGIGKSGAQPAKKRLNFGQTGDTESVPDPQPIGEPPAAPSGVGSLTMASGGGAPVADNNEGADGVGSSSGNWHCDSQWLGDRVITTSTRTWALPTYNNHLYKQISNSTSGGSSNDNAYFGYSTPWGYFDFNRFHCHFSPRDWQRLINNNWGFRPKRLNFKLFNIQVKEVTDNNGVKTIANNLTSTVQVFADSDYQLPYVLGSAHEGCLPPFPADVFMIPQYGYLTLNDGSQAVGRSSFYCLEYFPSQMLRTGNNFQFSYEFENVPFHSSYAHSQSLDRLMNPLIDQYLYYLSKTINGSGQNQQTLKFSVAGPSNMAVQGRNYIPGPSYRQQRVSTTVTQNNNSEFAWPRASSWALNGRNSLMNPGPAMASHKEGEDRFFPLSGSLIFGKQGTGRDNVDADKVMITNEEEIKTTNPVATESYGQVATNHQSAQARAQTGWVQNQGILPGMVWQDRDVYLQGPIWAKIPHTDGNFHPSPLMGGFGMKHPPPQILIKNTPVPADPPTAFNKDKLNSFITQYSTGQVSVEIEWELQKENSKRWNPEIQYTSNLYKSNNVEFAVNTEGVYSEPRPIGTRYLTRNL

SEQ ID NO: 1116 - protein, 736 aa, synthetic construct
MAADGYLPDWLEDNLSEGIREWWALKPGAPQPKANQQHQDNARGLVLPGYKYLGPGNGLDKGEPVNAADAAALEHDKAYDQQLKAGDNPYLKYNHADAEFQERLKEDTSFGGNLGRAVFQAKKRLLEPLGLVEEAAKTAPGKKRPVEQSPQEPDSSAGIGKSGAQPAKKRLNFGQTGDTESVPDPQPIGEPPAAPSGVGSLTMASGGGAPVADNNEGADGVGSSSGNWHCDSQWLGDRVITTSTRTWALPTYNNHLYKQISNSTSGGSSNDNAYFGYSTPWGYFDFNRFHCHFSPRDWQRLINNNWGFRPKRLNFKLFNIQVKEVTDNNGVKTIANNLTSTVQVFADSDYQLPYVLGSAHEGCLPPFPADVFMIPQYGYLTLNDGSQAVGRSSFYCLEYFPSQMLRTGNNFQFSYEFENVPFHSSYAHSQSLDRLMNPLIDQYLYYLSKTINGSGQNQQTLKFSVAGPSNMAVQGRNYIPGPSYRQQRVSTTVTQNNNSEFAWPGASSWALNGRNSLMNPGPAMASHKEGEDRFFPLSGSLIFGKQGTGRDNVDADKVMITNEEEIKTTNPVATESYGQVATNHQSAQARAQTGWVQNQGILPGMVWQDRDVYLQGPIWAKIPHTDGNFHPSPLMGGFGMKHPPPQILIKNTPVPADPPTAFNKDKLNSFITQYSTGQVSVEIEWELQKENSKRWNPEIQYTSNLCKSNNVEFAVNTEGVYSEPRPIGTRYLTRNL

SEQ ID NO: 1117 - protein, 736 aa, synthetic construct
MAADGYLPDWLEDNLSEGIREWWALKPGAPQPKANQQHQDNARGLVLPGYKYLGPGNGLDKGEPVNAADAAALEHDKAYDQQLKAGDNPYLKYNHADAEFQERLKEDTSFGGNLGRAVFQAKKRLLEPLGLVEEAAKTAPGKKRPVEQSPQEPDSSAGIGKSGAQPAKKRLNFGQTGDTESVPDPQPIGEPPAAPSGVGSLTMASGGGAPVADNNEGADGVGSSSGNWHCDSQWLGDRVITTSTRTWALPTYNNHLYKQISNSTSGGSSNDNAYFGYSTPWGYFDFNRFHCHFSPRDWQRLINNNWGFRPKRLNFKLFNIQVKEVTDNNGVKTIANNLTSTVQVFADSDYQLPYVLGSAHEGCLPPFPADVFMIPQYGYLTLNDGSQAVGRSSFYCLEYFPSQMLRTGNNFQFSYEFENVPFHSSYAHSQSLDRLMNPLIDQYLYYLSKTINGSGQNQQTLKFSVAGPSNMAVQGRNYIPGPSYRQQRVSTTVTQNNNSEIAWPRASSWALNGRNSLMNPGPAMASHKEGEDRFFPLSGSLIFGKQGTGRDNVDADKVMITNEEEIKTTNPVATESYGQVATNHQSAQARAQTGWVQNQGILPGMVWQDRDVYLQGPIWAKIPHTDGNFHPSPLMGGFGMKHPPPQILIKNTPVPADPPTAFNKDKLNSFITQYSTGQVSVEIEWELQKENSKRWNPEIQYTSNLYKSNNVEFAVNTEGVYSEPRPIGTRYLTRNL

SEQ ID NO: 1118 - protein, 736 aa, synthetic construct
MAADGYLPDWLEDNLSEGIREWWALKPGAPQPKANQQHQDNARGLVLPGYKYLGPGNGLDKGEPVNAADAAALEHDKAYDQQLKAGDNPYLKYNHADAEFQERLKEDTSFGGNLGRAVFQAKKRLLEPLGLVEEAAKTAPGKKRPVEQSPQEPDSSAGIGKSGAQPAKKRLNFGQTGDTESVPDPQPIGEPPAAPSGVGSLTMASGGGAPVADNNEGADGVGSSSGNWHCDSQWLGDRVITTSTRTWALPTYNNHLYKQISNSTSGGSSNDNAYFGYSTPWGYFDFNRFHCHFSPRDWQRLINNNWGFRPKRLNFKLFNIQVKEVTDNNGVKTIANNLTSTVQVFADSDYQLPYVLGSAHEGCLPPFPADVFMIPQYGYLTLNDGSQAVGRSSFYCLEYFPSQMLRTGNNFQFSYEFENVPFHSSYAHSQSLDRLMNPLIDQYLYYLSKTINGSGQNQQTLKFSVAGPSNMAVQGRNYIPGPSYRQQRVSTTVTQNNNSEIAWPGASSWALNGRNSLMNPGPAMASHKEGEDRFFPLSGSLIFGKQGTGRDNVDADKVMITNEEEIKTTNPVATESYGQVATNHQSAQARAQTGWVQNQGILPGMVWQDRDVYLQGPIWAKIPHTDGNFHPSPLMGGFGMKHPPPQILIKNTPVPADPPTAFNKDKLNSFITQYSTGQVSVEIEWELQKENSKRWNPEIQYTSNLCKSNNVEFAVNTEGVYSEPRPIGTRYLTRNL

SEQ ID NO: 1119 - protein, 736 aa, synthetic construct
MAADGYLPDWLEDNLSEGIREWWALKPGAPQPKANQQHQDNARGLVLPGYKYLGPGNGLDKGEPVNAADAAALEHDKAYDQQLKAGDNPYLKYNHADAEFQERLKEDTSFGGNLGRAVFQAKKRLLEPLGLVEEAAKTAPGKKRPVEQSPQEPDSSAGIGKSGAQPAKKRLNFGQTGDTESVPDPQPIGEPPAAPSGVGSLTMASGGGAPVADNNEGADGVGSSSGNWHCDSQWLGDRVITTSTRTWALPTYNNHLYKQISNSTSGGSSNDNAYFGYSTPWGYFDFNRFHCHFSPRDWQRLINNNWGFRPKRLNFKLFNIQVKEVTDNNGVKTIANNLTSTVQVFADSDYQLPYVLGSAHEGCLPPFPADVFMIPQYGYLTLNDGSQAVGRSSFYCLEYFPSQMLRTGNNFQFSYEFENVPFHSSYAHSQSLDRLMNPLIDQYLYYLSKTINGSGQNQQTLKFSVAGPSNMAVQGRNYIPGPSYRQQRVSTTVTQNNNSEFAWPRASSWALNGRNSLMNPGPAMASHKEGEDRFFPLSGSLIFGKQGTGRDNVDADKVMITNEEEIKTTNPVATESYGQVATNHQSAQARAQTGWVQNQGILPGMVWQDRDVYLQGPIWAKIPHTDGNFHPSPLMGGFGMKHPPPQILIKNTPVPADPPTAFNKDKLNSFITQYSTGQVSVEIEWELQKENSKRWNPEIQYTSNLCKSNNVEFAVNTEGVYSEPRPIGTRYLTRNL

SEQ ID NO: 1120 - protein, 736 aa, synthetic construct
MAADGYLPDWLEDNLSEGIREWWALKPGAPQPKANQQHQDNARGLVLPGYKYLGPGNGLDKGEPVNAADAAALEHDKAYDQQLKAGDNPYLKYNHADAEFQERLKEDTSFGGNLGRAVFQAKKRLLEPLGLVEEAAKTAPGKKRPVEQSPQEPDSSAGIGKSGAQPAKKRLNFGQTGDTESVPDPQPIGEPPAAPSGVGSLTMASGGGAPVADNNEGADGVGSSSGNWHCDSQWLGDRVITTSTRTWALPTYNNHLYKQISNSTSGGSSNDNAYFGYSTPWGYFDFNRFHCHFSPRDWQRLINNNWGFRPKRLNFKLFNIQVKEVTDNNGVKTIANNLTSTVQVFADSDYQLPYVLGSAHEGCLPPFPADVFMIPQYGYLTLNDGSQAVGRSSFYCLEYFPSQMLRTGNNFQFSYEFENVPFHSSYAHSQSLDRLMNPLIDQYLYYLSKTINGSGQNQQTLKFSVAGPSNMAVQGRNYIPGPSYRQQRVSTTVTQNNNSEIAWPRASSWALNGRNSLMNPGPAMASHKEGEDRFFPLSGSLIFGKQGTGRDNVDADKVMITNEEEIKTTNPVATESYGQVATNHQSAQARAQTGWVQNQGILPGMVWQDRDVYLQGPIWAKIPHTDGNFHPSPLMGGFGMKHPPPQILIKNTPVPADPPTAFNKDKLNSFITQYSTGQVSVEIEWELQKENSKRWNPEIQYTSNLCKSNNVEFAVNTEGVYSEPRPIGTRYLTRNL

SEQ ID NO: 1121 - protein, 736 aa, synthetic construct
MAADGYLPDWLEDNLSEGIREWWALKPGAPQPKANQQHQDNARGLVLPGYKYLGPGNGLDKGEPVNAVDAAALEHDKAYDQQLKAGDNPYLKYNHADAEFQERLKEDTSFGGNLGRAVFQAKKRLLEPLGLVEEAAKTAPGKKRPVEQSPQEPDSSAGIGKSGAQPAKKRLNFGQTGDTESVPDPQPIGEPPAAPSGVGSLTMASGGGAPVADNNEGADGVGSSSGNWHCDSQWLGDRVITTSTRTWALPTYNNHLYKQISNSTSGGSSNDNAYFGYSTPWGYFDFNRFHCHFSPRDWQRLINNNWGFRPKRLNFKLFNIQVKEVTDNNGVKTIANNLTSTVQVFGDSDYQLPYVLGSAHEGCLPPFPADVFMIPQYGYLTLNDGSQAVGRSSFYCLEYFPSQMLRTGNNFQFSYEFENVPFHSSYAHSQSLDRLMNPLIDQYLYYLSKTINGSGQNQQTLKFSVAGPSNMAVQGRNYIPGPSYRQQRVSTTVTQNNNSEFAWPGASSWALNGRNSLMNPGPAMASHKEGEDRFFPLSGSLIFGKQGTGRDNVDADKVMITNEEEIKTTNPVATESYGQVATNHQSAQAQAQTGWVQNQGILPGMVWQDRDVYLQGPIWAKIPHTDGNFHPSPLMGGFGMKHPPPQILIKNTPVPADPPTAFNKDKLNSFITQYSTGQVSVEIEWELQKENSKRWNPEIQYTSNYYKSNNVEFAVNTEGVYSEPRPIGTRYLTRNL

SEQ ID NO: 1122 - protein, 736 aa, synthetic construct
MAADGYLPDWLEDNLSEGIREWWALKPGAPQPKANQQHQDNARGLVLPGYKYLGPGNGLDKGEPVNAVDAAALEHDKAYDQQLKAGDNPYLKYNHADAEFQERLKEDTSFGGNLGRAVFQAKKRLLEPLGLVEEAAKTAPGKKRPVEQSPQEPDSSAGIGKSGAQPAKKRLNFGQTGDTESVPDPQPIGEPPAAPSGVGSLTMASGGGAPVADNNEGADGVGSSSGNWHCDSQWLGDRVITTSTRTWALPTYNNHLYKQISNSTSGGSSNDNAYFGYSTPWGYFDFNRFHCHFSPRDWQRLINNNWGFRPKRLNFKLFNIQVKEVTDNNGVKTIANNLTSTVQVFGDSDYQLPYVLGSAHEGCLPPFPADVFMIPQYGYLTLNDGSQAVGRSSFYCLEYFPSQMLRTGNNFQFSYEFENVPFHSSYAHSQSLDRLMNPLIDQYLYYLSKTINGSGQNQQTLKFSVAGPSNMAVQGRNYIPGPSYRQQRVSTTVTQNNNSEIAWPGASSWALNGRNSLMNPGPAMASHKEGEDRFFPLSGSLIFGKQGTGRDNVDADKVMITNEEEIKTTNPVATESYGQVATNHQSAQAQAQTGWVQNQGILPGMVWQDRDVYLQGPIWAKIPHTDGNFHPSPLMGGFGMKHPPPQILIKNTPVPADPPTAFNKDKLNSFITQYSTGQVSVEIEWELQKENSKRWNPEIQYTSNYYKSNNVEFAVNTEGVYSEPRPIGTRYLTRNL

SEQ ID NO: 1123 - protein, 736 aa, synthetic construct
MAADGYLPDWLEDNLSEGIREWWALKPGAPQPKANQQHQDNARGLVLPGYKYLGPGNGLDKGEPVNAVDAAALEHDKAYDQQLKAGDNPYLKYNHADAEFQERLKEDTSFGGNLGRAVFQAKKRLLEPLGLVEEAAKTAPGKKRPVEQSPQEPDSSAGIGKSGAQPAKKRLNFGQTGDTESVPDPQPIGEPPAAPSGVGSLTMASGGGAPVADNNEGADGVGSSSGNWHCDSQWLGDRVITTSTRTWALPTYNNHLYKQISNSTSGGSSNDNAYFGYSTPWGYFDFNRFHCHFSPRDWQRLINNNWGFRPKRLNFKLFNIQVKEVTDNNGVKTIANNLTSTVQVFGDSDYQLPYVLGSAHEGCLPPFPADVFMIPQYGYLTLNDGSQAVGRSSFYCLEYFPSQMLRTGNNFQFSYEFENVPFHSSYAHSQSLDRLMNPLIDQYLYYLSKTINGSGQNQQTLKFSVAGPSNMAVQGRNYIPGPSYRQQRVSTTVTQNNNSEFAWPRASSWALNGRNSLMNPGPAMASHKEGEDRFFPLSGSLIFGKQGTGRDNVDADKVMITNEEEIKTTNPVATESYGQVATNHQSAQAQAQTGWVQNQGILPGMVWQDRDVYLQGPIWAKIPHTDGNFHPSPLMGGFGMKHPPPQILIKNTPVPADPPTAFNKDKLNSFITQYSTGQVSVEIEWELQKENSKRWNPEIQYTSNYYKSNNVEFAVNTEGVYSEPRPIGTRYLTRNL

SEQ ID NO: 1124 - protein, 736 aa, synthetic construct
MAADGYLPDWLEDNLSEGIREWWALKPGAPQPKANQQHQDNARGLVLPGYKYLGPGNGLDKGEPVNAVDAAALEHDKAYDQQLKAGDNPYLKYNHADAEFQERLKEDTSFGGNLGRAVFQAKKRLLEPLGLVEEAAKTAPGKKRPVEQSPQEPDSSAGIGKSGAQPAKKRLNFGQTGDTESVPDPQPIGEPPAAPSGVGSLTMASGGGAPVADNNEGADGVGSSSGNWHCDSQWLGDRVITTSTRTWALPTYNNHLYKQISNSTSGGSSNDNAYFGYSTPWGYFDFNRFHCHFSPRDWQRLINNNWGFRPKRLNFKLFNIQVKEVTDNNGVKTIANNLTSTVQVFGDSDYQLPYVLGSAHEGCLPPFPADVFMIPQYGYLTLNDGSQAVGRSSFYCLEYFPSQMLRTGNNFQFSYEFENVPFHSSYAHSQSLDRLMNPLIDQYLYYLSKTINGSGQNQQTLKFSVAGPSNMAVQGRNYIPGPSYRQQRVSTTVTQNNNSEFAWPGASSWALNGRNSLMNPGPAMASHKEGEDRFFPLSGSLIFGKQGTGRDNVDADKVMITNEEEIKTTNPVATESYGQVATNHQSAQAQAQTGWVQNQGILPGMVWQDRDVYLQGPIWAKIPHTDGNFHPSPLMGGFGMKHPPPQILIKNTPVPADPPTAFNKDKLNSFITQYSTGQVSVEIEWELQKENSKRWNPEIQYTSNYCKSNNVEFAVNTEGVYSEPRPIGTRYLTRNL

SEQ ID NO: 1125 - protein, 736 aa, synthetic construct
MAADGYLPDWLEDNLSEGIREWWALKPGAPQPKANQQHQDNARGLVLPGYKYLGPGNGLDKGEPVNAVDAAALEHDKAYDQQLKAGDNPYLKYNHADAEFQERLKEDTSFGGNLGRAVFQAKKRLLEPLGLVEEAAKTAPGKKRPVEQSPQEPDSSAGIGKSGAQPAKKRLNFGQTGDTESVPDPQPIGEPPAAPSGVGSLTMASGGGAPVADNNEGADGVGSSSGNWHCDSQWLGDRVITTSTRTWALPTYNNHLYKQISNSTSGGSSNDNAYFGYSTPWGYFDFNRFHCHFSPRDWQRLINNNWGFRPKRLNFKLFNIQVKEVTDNNGVKTIANNLTSTVQVFGDSDYQLPYVLGSAHEGCLPPFPADVFMIPQYGYLTLNDGSQAVGRSSFYCLEYFPSQMLRTGNNFQFSYEFENVPFHSSYAHSQSLDRLMNPLIDQYLYYLSKTINGSGQNQQTLKFSVAGPSNMAVQGRNYIPGPSYRQQRVSTTVTQNNNSEIAWPRASSWALNGRNSLMNPGPAMASHKEGEDRFFPLSGSLIFGKQGTGRDNVDADKVMITNEEEIKTTNPVATESYGQVATNHQSAQAQAQTGWVQNQGILPGMVWQDRDVYLQGPIWAKIPHTDGNFHPSPLMGGFGMKHPPPQILIKNTPVPADPPTAFNKDKLNSFITQYSTGQVSVEIEWELQKENSKRWNPEIQYTSNYYKSNNVEFAVNTEGVYSEPRPIGTRYLTRNL

SEQ ID NO: 1126 - protein, 736 aa, synthetic construct
MAADGYLPDWLEDNLSEGIREWWALKPGAPQPKANQQHQDNARGLVLPGYKYLGPGNGLDKGEPVNAVDAAALEHDKAYDQQLKAGDNPYLKYNHADAEFQERLKEDTSFGGNLGRAVFQAKKRLLEPLGLVEEAAKTAPGKKRPVEQSPQEPDSSAGIGKSGAQPAKKRLNFGQTGDTESVPDPQPIGEPPAAPSGVGSLTMASGGGAPVADNNEGADGVGSSSGNWHCDSQWLGDRVITTSTRTWALPTYNNHLYKQISNSTSGGSSNDNAYFGYSTPWGYFDFNRFHCHFSPRDWQRLINNNWGFRPKRLNFKLFNIQVKEVTDNNGVKTIANNLTSTVQVFGDSDYQLPYVLGSAHEGCLPPFPADVFMIPQYGYLTLNDGSQAVGRSSFYCLEYFPSQMLRTGNNFQFSYEFENVPFHSSYAHSQSLDRLMNPLIDQYLYYLSKTINGSGQNQQTLKFSVAGPSNMAVQGRNYIPGPSYRQQRVSTTVTQNNNSEIAWPGASSWALNGRNSLMNPGPAMASHKEGEDRFFPLSGSLIFGKQGTGRDNVDADKVMITNEEEIKTTNPVATESYGQVATNHQSAQAQAQTGWVQNQGILPGMVWQDRDVYLQGPIWAKIPHTDGNFHPSPLMGGFGMKHPPPQILIKNTPVPADPPTAFNKDKLNSFITQYSTGQVSVEIEWELQKENSKRWNPEIQYTSNYCKSNNVEFAVNTEGVYSEPRPIGTRYLTRNL

SEQ ID NO: 1127 - protein, 736 aa, synthetic construct
MAADGYLPDWLEDNLSEGIREWWALKPGAPQPKANQQHQDNARGLVLPGYKYLGPGNGLDKGEPVNAVDAAALEHDKAYDQQLKAGDNPYLKYNHADAEFQERLKEDTSFGGNLGRAVFQAKKRLLEPLGLVEEAAKTAPGKKRPVEQSPQEPDSSAGIGKSGAQPAKKRLNFGQTGDTESVPDPQPIGEPPAAPSGVGSLTMASGGGAPVADNNEGADGVGSSSGNWHCDSQWLGDRVITTSTRTWALPTYNNHLYKQISNSTSGGSSNDNAYFGYSTPWGYFDFNRFHCHFSPRDWQRLINNNWGFRPKRLNFKLFNIQVKEVTDNNGVKTIANNLTSTVQVFGDSDYQLPYVLGSAHEGCLPPFPADVFMIPQYGYLTLNDGSQAVGRSSFYCLEYFPSQMLRTGNNFQFSYEFENVPFHSSYAHSQSLDRLMNPLIDQYLYYLSKTINGSGQNQQTLKFSVAGPSNMAVQGRNYIPGPSYRQQRVSTTVTQNNNSEFAWPRASSWALNGRNSLMNPGPAMASHKEGEDRFFPLSGSLIFGKQGTGRDNVDADKVMITNEEEIKTTNPVATESYGQVATNHQSAQAQAQTGWVQNQGILPGMVWQDRDVYLQGPIWAKIPHTDGNFHPSPLMGGFGMKHPPPQILIKNTPVPADPPTAFNKDKLNSFITQYSTGQVSVEIEWELQKENSKRWNPEIQYTSNYCKSNNVEFAVNTEGVYSEPRPIGTRYLTRNL

SEQ ID NO: 1128 - protein, 736 aa, synthetic construct
MAADGYLPDWLEDNLSEGIREWWALKPGAPQPKANQQHQDNARGLVLPGYKYLGPGNGLDKGEPVNAVDAAALEHDKAYDQQLKAGDNPYLKYNHADAEFQERLKEDTSFGGNLGRAVFQAKKRLLEPLGLVEEAAKTAPGKKRPVEQSPQEPDSSAGIGKSGAQPAKKRLNFGQTGDTESVPDPQPIGEPPAAPSGVGSLTMASGGGAPVADNNEGADGVGSSSGNWHCDSQWLGDRVITTSTRTWALPTYNNHLYKQISNSTSGGSSNDNAYFGYSTPWGYFDFNRFHCHFSPRDWQRLINNNWGFRPKRLNFKLFNIQVKEVTDNNGVKTIANNLTSTVQVFGDSDYQLPYVLGSAHEGCLPPFPADVFMIPQYGYLTLNDGSQAVGRSSFYCLEYFPSQMLRTGNNFQFSYEFENVPFHSSYAHSQSLDRLMNPLIDQYLYYLSKTINGSGQNQQTLKFSVAGPSNMAVQGRNYIPGPSYRQQRVSTTVTQNNNSEIAWPRASSWALNGRNSLMNPGPAMASHKEGEDRFFPLSGSLIFGKQGTGRDNVDADKVMITNEEEIKTTNPVATESYGQVATNHQSAQAQAQTGWVQNQGILPGMVWQDRDVYLQGPIWAKIPHTDGNFHPSPLMGGFGMKHPPPQILIKNTPVPADPPTAFNKDKLNSFITQYSTGQVSVEIEWELQKENSKRWNPEIQYTSNYCKSNNVEFAVNTEGVYSEPRPIGTRYLTRNL

SEQ ID NO: 1129 - protein, 736 aa, synthetic construct
MAADGYLPDWLEDNLSEGIREWWALKPGAPQPKANQQHQDNARGLVLPGYKYLGPGNGLDKGEPVNAVDAAALEHDKAYDQQLKAGDNPYLKYNHADAEFQERLKEDTSFGGNLGRAVFQAKKRLLEPLGLVEEAAKTAPGKKRPVEQSPQEPDSSAGIGKSGAQPAKKRLNFGQTGDTESVPDPQPIGEPPAAPSGVGSLTMASGGGAPVADNNEGADGVGSSSGNWHCDSQWLGDRVITTSTRTWALPTYNNHLYKQISNSTSGGSSNDNAYFGYSTPWGYFDFNRFHCHFSPRDWQRLINNNWGFRPKRLNFKLFNIQVKEVTDNNGVKTIANNLTSTVQVFTDSDYQLPYVLGSAHEGCLPPFPADVFMIPQYGYLTLNDGSQAVGRSSFYCLEYFPSQMLRTGNNFQFSYEFENVPFHSSYAHSQSLDRLMNPLIDQYLYYLSKTINGSGQNQQTLKFSVAGPSNMAVQGRNYIPGPSYRQQRVSTTVTQNNNSEFAWPGASSWALNGRNSLMNPGPAMASHKEGEDRFFPLSGSLIFGKQGTGRDNVDADKVMITNEEEIKTTNPVATESYGQVATNHQSAQAQAQTGWVQNQGILPGMVWQDRDVYLQGPIWAKIPHTDGNFHPSPLMGGFGMKHPPPQILIKNTPVPADPPTAFNKDKLNSFITQYSTGQVSVEIEWELQKENSKRWNPEIQYTSNLYKSNNVEFAVNTEGVYSEPRPIGTRYLTRNL

SEQ ID NO: 1130 - protein, 736 aa, synthetic construct
MAADGYLPDWLEDNLSEGIREWWALKPGAPQPKANQQHQDNARGLVLPGYKYLGPGNGLDKGEPVNAVDAAALEHDKAYDQQLKAGDNPYLKYNHADAEFQERLKEDTSFGGNLGRAVFQAKKRLLEPLGLVEEAAKTAPGKKRPVEQSPQEPDSSAGIGKSGAQPAKKRLNFGQTGDTESVPDPQPIGEPPAAPSGVGSLTMASGGGAPVADNNEGADGVGSSSGNWHCDSQWLGDRVITTSTRTWALPTYNNHLYKQISNSTSGGSSNDNAYFGYSTPWGYFDFNRFHCHFSPRDWQRLINNNWGFRPKRLNFKLFNIQVKEVTDNNGVKTIANNLTSTVQVFTDSDYQLPYVLGSAHEGCLPPFPADVFMIPQYGYLTLNDGSQAVGRSSFYCLEYFPSQMLRTGNNFQFSYEFENVPFHSSYAHSQSLDRLMNPLIDQYLYYLSKTINGSGQNQQTLKFSVAGPSNMAVQGRNYIPGPSYRQQRVSTTVTQNNNSEIAWPGASSWALNGRNSLMNPGPAMASHKEGEDRFFPLSGSLIFGKQGTGRDNVDADKVMITNEEEIKTTNPVATESYGQVATNHQSAQAQAQTGWVQNQGILPGMVWQDRDVYLQGPIWAKIPHTDGNFHPSPLMGGFGMKHPPPQILIKNTPVPADPPTAFNKDKLNSFITQYSTGQVSVEIEWELQKENSKRWNPEIQYTSNLYKSNNVEFAVNTEGVYSEPRPIGTRYLTRNL

SEQ ID NO: 1131 - protein, 736 aa, synthetic construct
MAADGYLPDWLEDNLSEGIREWWALKPGAPQPKANQQHQDNARGLVLPGYKYLGPGNGLDKGEPVNAVDAAALEHDKAYDQQLKAGDNPYLKYNHADAEFQERLKEDTSFGGNLGRAVFQAKKRLLEPLGLVEEAAKTAPGKKRPVEQSPQEPDSSAGIGKSGAQPAKKRLNFGQTGDTESVPDPQPIGEPPAAPSGVGSLTMASGGGAPVADNNEGADGVGSSSGNWHCDSQWLGDRVITTSTRTWALPTYNNHLYKQISNSTSGGSSNDNAYFGYSTPWGYFDFNRFHCHFSPRDWQRLINNNWGFRPKRLNFKLFNIQVKEVTDNNGVKTIANNLTSTVQVFTDSDYQLPYVLGSAHEGCLPPFPADVFMIPQYGYLTLNDGSQAVGRSSFYCLEYFPSQMLRTGNNFQFSYEFENVPFHSSYAHSQSLDRLMNPLIDQYLYYLSKTINGSGQNQQTLKFSVAGPSNMAVQGRNYIPGPSYRQQRVSTTVTQNNNSEFAWPRASSWALNGRNSLMNPGPAMASHKEGEDRFFPLSGSLIFGKQGTGRDNVDADKVMITNEEEIKTTNPVATESYGQVATNHQSAQAQAQTGWVQNQGILPGMVWQDRDVYLQGPIWAKIPHTDGNFHPSPLMGGFGMKHPPPQILIKNTPVPADPPTAFNKDKLNSFITQYSTGQVSVEIEWELQKENSKRWNPEIQYTSNLYKSNNVEFAVNTEGVYSEPRPIGTRYLTRNL

SEQ ID NO: 1132 - protein, 736 aa, synthetic construct
MAADGYLPDWLEDNLSEGIREWWALKPGAPQPKANQQHQDNARGLVLPGYKYLGPGNGLDKGEPVNAVDAAALEHDKAYDQQLKAGDNPYLKYNHADAEFQERLKEDTSFGGNLGRAVFQAKKRLLEPLGLVEEAAKTAPGKKRPVEQSPQEPDSSAGIGKSGAQPAKKRLNFGQTGDTESVPDPQPIGEPPAAPSGVGSLTMASGGGAPVADNNEGADGVGSSSGNWHCDSQWLGDRVITTSTRTWALPTYNNHLYKQISNSTSGGSSNDNAYFGYSTPWGYFDFNRFHCHFSPRDWQRLINNNWGFRPKRLNFKLFNIQVKEVTDNNGVKTIANNLTSTVQVFTDSDYQLPYVLGSAHEGCLPPFPADVFMIPQYGYLTLNDGSQAVGRSSFYCLEYFPSQMLRTGNNFQFSYEFENVPFHSSYAHSQSLDRLMNPLIDQYLYYLSKTINGSGQNQQTLKFSVAGPSNMAVQGRNYIPGPSYRQQRVSTTVTQNNNSEFAWPGASSWALNGRNSLMNPGPAMASHKEGEDRFFPLSGSLIFGKQGTGRDNVDADKVMITNEEEIKTTNPVATESYGQVATNHQSAQAQAQTGWVQNQGILPGMVWQDRDVYLQGPIWAKIPHTDGNFHPSPLMGGFGMKHPPPQILIKNTPVPADPPTAFNKDKLNSFITQYSTGQVSVEIEWELQKENSKRWNPEIQYTSNLCKSNNVEFAVNTEGVYSEPRPIGTRYLTRNL

SEQ ID NO: 1133 - protein, 736 aa, synthetic construct
MAADGYLPDWLEDNLSEGIREWWALKPGAPQPKANQQHQDNARGLVLPGYKYLGPGNGLDKGEPVNAVDAAALEHDKAYDQQLKAGDNPYLKYNHADAEFQERLKEDTSFGGNLGRAVFQAKKRLLEPLGLVEEAAKTAPGKKRPVEQSPQEPDSSAGIGKSGAQPAKKRLNFGQTGDTESVPDPQPIGEPPAAPSGVGSLTMASGGGAPVADNNEGADGVGSSSGNWHCDSQWLGDRVITTSTRTWALPTYNNHLYKQISNSTSGGSSNDNAYFGYSTPWGYFDFNRFHCHFSPRDWQRLINNNWGFRPKRLNFKLFNIQVKEVTDNNGVKTIANNLTSTVQVFTDSDYQLPYVLGSAHEGCLPPFPADVFMIPQYGYLTLNDGSQAVGRSSFYCLEYFPSQMLRTGNNFQFSYEFENVPFHSSYAHSQSLDRLMNPLIDQYLYYLSKTINGSGQNQQTLKFSVAGPSNMAVQGRNYIPGPSYRQQRVSTTVTQNNNSEIAWPRASSWALNGRNSLMNPGPAMASHKEGEDRFFPLSGSLIFGKQGTGRDNVDADKVMITNEEEIKTTNPVATESYGQVATNHQSAQAQAQTGWVQNQGILPGMVWQDRDVYLQGPIWAKIPHTDGNFHPSPLMGGFGMKHPPPQILIKNTPVPADPPTAFNKDKLNSFITQYSTGQVSVEIEWELQKENSKRWNPEIQYTSNLYKSNNVEFAVNTEGVYSEPRPIGTRYLTRNL

SEQ ID NO: 1134 - protein, 736 aa, synthetic construct
MAADGYLPDWLEDNLSEGIREWWALKPGAPQPKANQQHQDNARGLVLPGYKYLGPGNGLDKGEPVNAVDAAALEHDKAYDQQLKAGDNPYLKYNHADAEFQERLKEDTSFGGNLGRAVFQAKKRLLEPLGLVEEAAKTAPGKKRPVEQSPQEPDSSAGIGKSGAQPAKKRLNFGQTGDTESVPDPQPIGEPPAAPSGVGSLTMASGGGAPVADNNEGADGVGSSSGNWHCDSQWLGDRVITTSTRTWALPTYNNHLYKQISNSTSGGSSNDNAYFGYSTPWGYFDFNRFHCHFSPRDWQRLINNNWGFRPKRLNFKLFNIQVKEVTDNNGVKTIANNLTSTVQVFTDSDYQLPYVLGSAHEGCLPPFPADVFMIPQYGYLTLNDGSQAVGRSSFYCLEYFPSQMLRTGNNFQFSYEFENVPFHSSYAHSQSLDRLMNPLIDQYLYYLSKTINGSGQNQQTLKFSVAGPSNMAVQGRNYIPGPSYRQQRVSTTVTQNNNSEIAWPGASSWALNGRNSLMNPGPAMASHKEGEDRFFPLSGSLIFGKQGTGRDNVDADKVMITNEEEIKTTNPVATESYGQVATNHQSAQAQAQTGWVQNQGILPGMVWQDRDVYLQGPIWAKIPHTDGNFHPSPLMGGFGMKHPPPQILIKNTPVPADPPTAFNKDKLNSFITQYSTGQVSVEIEWELQKENSKRWNPEIQYTSNLCKSNNVEFAVNTEGVYSEPRPIGTRYLTRNL

SEQ ID NO: 1135 - protein, 736 aa, synthetic construct
MAADGYLPDWLEDNLSEGIREWWALKPGAPQPKANQQHQDNARGLVLPGYKYLGPGNGLDKGEPVNAVDAAALEHDKAYDQQLKAGDNPYLKYNHADAEFQERLKEDTSFGGNLGRAVFQAKKRLLEPLGLVEEAAKTAPGKKRPVEQSPQEPDSSAGIGKSGAQPAKKRLNFGQTGDTESVPDPQPIGEPPAAPSGVGSLTMASGGGAPVADNNEGADGVGSSSGNWHCDSQWLGDRVITTSTRTWALPTYNNHLYKQISNSTSGGSSNDNAYFGYSTPWGYFDFNRFHCHFSPRDWQRLINNNWGFRPKRLNFKLFNIQVKEVTDNNGVKTIANNLTSTVQVFTDSDYQLPYVLGSAHEGCLPPFPADVFMIPQYGYLTLNDGSQAVGRSSFYCLEYFPSQMLRTGNNFQFSYEFENVPFHSSYAHSQSLDRLMNPLIDQYLYYLSKTINGSGQNQQTLKFSVAGPSNMAVQGRNYIPGPSYRQQRVSTTVTQNNNSEFAWPRASSWALNGRNSLMNPGPAMASHKEGEDRFFPLSGSLIFGKQGTGRDNVDADKVMITNEEEIKTTNPVATESYGQVATNHQSAQAQAQTGWVQNQGILPGMVWQDRDVYLQGPIWAKIPHTDGNFHPSPLMGGFGMKHPPPQILIKNTPVPADPPTAFNKDKLNSFITQYSTGQVSVEIEWELQKENSKRWNPEIQYTSNLCKSNNVEFAVNTEGVYSEPRPIGTRYLTRNL

SEQ ID NO: 1136 - protein, 736 aa, synthetic construct
MAADGYLPDWLEDNLSEGIREWWALKPGAPQPKANQQHQDNARGLVLPGYKYLGPGNGLDKGEPVNAVDAAALEHDKAYDQQLKAGDNPYLKYNHADAEFQERLKEDTSFGGNLGRAVFQAKKRLLEPLGLVEEAAKTAPGKKRPVEQSPQEPDSSAGIGKSGAQPAKKRLNFGQTGDTESVPDPQPIGEPPAAPSGVGSLTMASGGGAPVADNNEGADGVGSSSGNWHCDSQWLGDRVITTSTRTWALPTYNNHLYKQISNSTSGGSSNDNAYFGYSTPWGYFDFNRFHCHFSPRDWQRLINNNWGFRPKRLNFKLFNIQVKEVTDNNGVKTIANNLTSTVQVFTDSDYQLPYVLGSAHEGCLPPFPADVFMIPQYGYLTLNDGSQAVGRSSFYCLEYFPSQMLRTGNNFQFSYEFENVPFHSSYAHSQSLDRLMNPLIDQYLYYLSKTINGSGQNQQTLKFSVAGPSNMAVQGRNYIPGPSYRQQRVSTTVTQNNNSEIAWPRASSWALNGRNSLMNPGPAMASHKEGEDRFFPLSGSLIFGKQGTGRDNVDADKVMITNEEEIKTTNPVATESYGQVATNHQSAQAQAQTGWVQNQGILPGMVWQDRDVYLQGPIWAKIPHTDGNFHPSPLMGGFGMKHPPPQILIKNTPVPADPPTAFNKDKLNSFITQYSTGQVSVEIEWELQKENSKRWNPEIQYTSNLCKSNNVEFAVNTEGVYSEPRPIGTRYLTRNL

SEQ ID NO: 1137 - protein, 736 aa, synthetic construct
MAADGYLPDWLEDNLSEGIREWWALKPGAPQPKANQQHQDNARGLVLPGYKYLGPGNGLDKGEPVNAVDAAALEHDKAYDQQLKAGDNPYLKYNHADAEFQERLKEDTSFGGNLGRAVFQAKKRLLEPLGLVEEAAKTAPGKKRPVEQSPQEPDSSAGIGKSGAQPAKKRLNFGQTGDTESVPDPQPIGEPPAAPSGVGSLTMASGGGAPVADNNEGADGVGSSSGNWHCDSQWLGDRVITTSTRTWALPTYNNHLYKQISNSTSGGSSNDNAYFGYSTPWGYFDFNRFHCHFSPRDWQRLINNNWGFRPKRLNFKLFNIQVKEVTDNNGVKTIANNLTSTVQVFGDSDYQLPYVLGSAHEGCLPPFPADVFMIPQYGYLTLNDGSQAVGRSSFYCLEYFPSQMLRTGNNFQFSYEFENVPFHSSYAHSQSLDRLMNPLIDQYLYYLSKTINGSGQNQQTLKFSVAGPSNMAVQGRNYIPGPSYRQQRVSTTVTQNNNSEFAWPGASSWALNGRNSLMNPGPAMASHKEGEDRFFPLSGSLIFGKQGTGRDNVDADKVMITNEEEIKTTNPVATESYGQVATNHQSAQAQAQTGWVQNQGILPGMVWQDRDVYLQGPIWAKIPHTDGNFHPSPLMGGFGMKHPPPQILIKNTPVPADPPTAFNKDKLNSFITQYSTGQVSVEIEWELQKENSKRWNPEIQYTSNLYKSNNVEFAVNTEGVYSEPRPIGTRYLTRNL

SEQ ID NO: 1138 - protein, 736 aa, synthetic construct
MAADGYLPDWLEDNLSEGIREWWALKPGAPQPKANQQHQDNARGLVLPGYKYLGPGNGLDKGEPVNAVDAAALEHDKAYDQQLKAGDNPYLKYNHADAEFQERLKEDTSFGGNLGRAVFQAKKRLLEPLGLVEEAAKTAPGKKRPVEQSPQEPDSSAGIGKSGAQPAKKRLNFGQTGDTESVPDPQPIGEPPAAPSGVGSLTMASGGGAPVADNNEGADGVGSSSGNWHCDSQWLGDRVITTSTRTWALPTYNNHLYKQISNSTSGGSSNDNAYFGYSTPWGYFDFNRFHCHFSPRDWQRLINNNWGFRPKRLNFKLFNIQVKEVTDNNGVKTIANNLTSTVQVFGDSDYQLPYVLGSAHEGCLPPFPADVFMIPQYGYLTLNDGSQAVGRSSFYCLEYFPSQMLRTGNNFQFSYEFENVPFHSSYAHSQSLDRLMNPLIDQYLYYLSKTINGSGQNQQTLKFSVAGPSNMAVQGRNYIPGPSYRQQRVSTTVTQNNNSEIAWPGASSWALNGRNSLMNPGPAMASHKEGEDRFFPLSGSLIFGKQGTGRDNVDADKVMITNEEEIKTTNPVATESYGQVATNHQSAQAQAQTGWVQNQGILPGMVWQDRDVYLQGPIWAKIPHTDGNFHPSPLMGGFGMKHPPPQILIKNTPVPADPPTAFNKDKLNSFITQYSTGQVSVEIEWELQKENSKRWNPEIQYTSNLYKSNNVEFAVNTEGVYSEPRPIGTRYLTRNL

SEQ ID NO: 1139 - protein, 736 aa, synthetic construct
MAADGYLPDWLEDNLSEGIREWWALKPGAPQPKANQQHQDNARGLVLPGYKYLGPGNGLDKGEPVNAVDAAALEHDKAYDQQLKAGDNPYLKYNHADAEFQERLKEDTSFGGNLGRAVFQAKKRLLEPLGLVEEAAKTAPGKKRPVEQSPQEPDSSAGIGKSGAQPAKKRLNFGQTGDTESVPDPQPIGEPPAAPSGVGSLTMASGGGAPVADNNEGADGVGSSSGNWHCDSQWLGDRVITTSTRTWALPTYNNHLYKQISNSTSGGSSNDNAYFGYSTPWGYFDFNRFHCHFSPRDWQRLINNNWGFRPKRLNFKLFNIQVKEVTDNNGVKTIANNLTSTVQVFGDSDYQLPYVLGSAHEGCLPPFPADVFMIPQYGYLTLNDGSQAVGRSSFYCLEYFPSQMLRTGNNFQFSYEFENVPFHSSYAHSQSLDRLMNPLIDQYLYYLSKTINGSGQNQQTLKFSVAGPSNMAVQGRNYIPGPSYRQQRVSTTVTQNNNSEFAWPRASSWALNGRNSLMNPGPAMASHKEGEDRFFPLSGSLIFGKQGTGRDNVDADKVMITNEEEIKTTNPVATESYGQVATNHQSAQAQAQTGWVQNQGILPGMVWQDRDVYLQGPIWAKIPHTDGNFHPSPLMGGFGMKHPPPQILIKNTPVPADPPTAFNKDKLNSFITQYSTGQVSVEIEWELQKENSKRWNPEIQYTSNLYKSNNVEFAVNTEGVYSEPRPIGTRYLTRNL

SEQ ID NO: 1140 - protein, 736 aa, synthetic construct
MAADGYLPDWLEDNLSEGIREWWALKPGAPQPKANQQHQDNARGLVLPGYKYLGPGNGLDKGEPVNAVDAAALEHDKAYDQQLKAGDNPYLKYNHADAEFQERLKEDTSFGGNLGRAVFQAKKRLLEPLGLVEEAAKTAPGKKRPVEQSPQEPDSSAGIGKSGAQPAKKRLNFGQTGDTESVPDPQPIGEPPAAPSGVGSLTMASGGGAPVADNNEGADGVGSSSGNWHCDSQWLGDRVITTSTRTWALPTYNNHLYKQISNSTSGGSSNDNAYFGYSTPWGYFDFNRFHCHFSPRDWQRLINNNWGFRPKRLNFKLFNIQVKEVTDNNGVKTIANNLTSTVQVFGDSDYQLPYVLGSAHEGCLPPFPADVFMIPQYGYLTLNDGSQAVGRSSFYCLEYFPSQMLRTGNNFQFSYEFENVPFHSSYAHSQSLDRLMNPLIDQYLYYLSKTINGSGQNQQTLKFSVAGPSNMAVQGRNYIPGPSYRQQRVSTTVTQNNNSEFAWPGASSWALNGRNSLMNPGPAMASHKEGEDRFFPLSGSLIFGKQGTGRDNVDADKVMITNEEEIKTTNPVATESYGQVATNHQSAQAQAQTGWVQNQGILPGMVWQDRDVYLQGPIWAKIPHTDGNFHPSPLMGGFGMKHPPPQILIKNTPVPADPPTAFNKDKLNSFITQYSTGQVSVEIEWELQKENSKRWNPEIQYTSNLCKSNNVEFAVNTEGVYSEPRPIGTRYLTRNL

SEQ ID NO: 1141 - protein, 736 aa, synthetic construct
MAADGYLPDWLEDNLSEGIREWWALKPGAPQPKANQQHQDNARGLVLPGYKYLGPGNGLDKGEPVNAVDAAALEHDKAYDQQLKAGDNPYLKYNHADAEFQERLKEDTSFGGNLGRAVFQAKKRLLEPLGLVEEAAKTAPGKKRPVEQSPQEPDSSAGIGKSGAQPAKKRLNFGQTGDTESVPDPQPIGEPPAAPSGVGSLTMASGGGAPVADNNEGADGVGSSSGNWHCDSQWLGDRVITTSTRTWALPTYNNHLYKQISNSTSGGSSNDNAYFGYSTPWGYFDFNRFHCHFSPRDWQRLINNNWGFRPKRLNFKLFNIQVKEVTDNNGVKTIANNLTSTVQVFGDSDYQLPYVLGSAHEGCLPPFPADVFMIPQYGYLTLNDGSQAVGRSSFYCLEYFPSQMLRTGNNFQFSYEFENVPFHSSYAHSQSLDRLMNPLIDQYLYYLSKTINGSGQNQQTLKFSVAGPSNMAVQGRNYIPGPSYRQQRVSTTVTQNNNSEIAWPRASSWALNGRNSLMNPGPAMASHKEGEDRFFPLSGSLIFGKQGTGRDNVDADKVMITNEEEIKTTNPVATESYGQVATNHQSAQAQAQTGWVQNQGILPGMVWQDRDVYLQGPIWAKIPHTDGNFHPSPLMGGFGMKHPPPQILIKNTPVPADPPTAFNKDKLNSFITQYSTGQVSVEIEWELQKENSKRWNPEIQYTSNLYKSNNVEFAVNTEGVYSEPRPIGTRYLTRNL

SEQ ID NO: 1142 - protein, 736 aa, synthetic construct
MAADGYLPDWLEDNLSEGIREWWALKPGAPQPKANQQHQDNARGLVLPGYKYLGPGNGLDKGEPVNAVDAAALEHDKAYDQQLKAGDNPYLKYNHADAEFQERLKEDTSFGGNLGRAVFQAKKRLLEPLGLVEEAAKTAPGKKRPVEQSPQEPDSSAGIGKSGAQPAKKRLNFGQTGDTESVPDPQPIGEPPAAPSGVGSLTMASGGGAPVADNNEGADGVGSSSGNWHCDSQWLGDRVITTSTRTWALPTYNNHLYKQISNSTSGGSSNDNAYFGYSTPWGYFDFNRFHCHFSPRDWQRLINNNWGFRPKRLNFKLFNIQVKEVTDNNGVKTIANNLTSTVQVFGDSDYQLPYVLGSAHEGCLPPFPADVFMIPQYGYLTLNDGSQAVGRSSFYCLEYFPSQMLRTGNNFQFSYEFENVPFHSSYAHSQSLDRLMNPLIDQYLYYLSKTINGSGQNQQTLKFSVAGPSNMAVQGRNYIPGPSYRQQRVSTTVTQNNNSEIAWPGASSWALNGRNSLMNPGPAMASHKEGEDRFFPLSGSLIFGKQGTGRDNVDADKVMITNEEEIKTTNPVATESYGQVATNHQSAQAQAQTGWVQNQGILPGMVWQDRDVYLQGPIWAKIPHTDGNFHPSPLMGGFGMKHPPPQILIKNTPVPADPPTAFNKDKLNSFITQYSTGQVSVEIEWELQKENSKRWNPEIQYTSNLCKSNNVEFAVNTEGVYSEPRPIGTRYLTRNL

SEQ ID NO: 1143 - protein, 736 aa, synthetic construct
MAADGYLPDWLEDNLSEGIREWWALKPGAPQPKANQQHQDNARGLVLPGYKYLGPGNGLDKGEPVNAVDAAALEHDKAYDQQLKAGDNPYLKYNHADAEFQERLKEDTSFGGNLGRAVFQAKKRLLEPLGLVEEAAKTAPGKKRPVEQSPQEPDSSAGIGKSGAQPAKKRLNFGQTGDTESVPDPQPIGEPPAAPSGVGSLTMASGGGAPVADNNEGADGVGSSSGNWHCDSQWLGDRVITTSTRTWALPTYNNHLYKQISNSTSGGSSNDNAYFGYSTPWGYFDFNRFHCHFSPRDWQRLINNNWGFRPKRLNFKLFNIQVKEVTDNNGVKTIANNLTSTVQVFGDSDYQLPYVLGSAHEGCLPPFPADVFMIPQYGYLTLNDGSQAVGRSSFYCLEYFPSQMLRTGNNFQFSYEFENVPFHSSYAHSQSLDRLMNPLIDQYLYYLSKTINGSGQNQQTLKFSVAGPSNMAVQGRNYIPGPSYRQQRVSTTVTQNNNSEFAWPRASSWALNGRNSLMNPGPAMASHKEGEDRFFPLSGSLIFGKQGTGRDNVDADKVMITNEEEIKTTNPVATESYGQVATNHQSAQAQAQTGWVQNQGILPGMVWQDRDVYLQGPIWAKIPHTDGNFHPSPLMGGFGMKHPPPQILIKNTPVPADPPTAFNKDKLNSFITQYSTGQVSVEIEWELQKENSKRWNPEIQYTSNLCKSNNVEFAVNTEGVYSEPRPIGTRYLTRNL

SEQ ID NO: 1144 - protein, 736 aa, synthetic construct
MAADGYLPDWLEDNLSEGIREWWALKPGAPQPKANQQHQDNARGLVLPGYKYLGPGNGLDKGEPVNAVDAAALEHDKAYDQQLKAGDNPYLKYNHADAEFQERLKEDTSFGGNLGRAVFQAKKRLLEPLGLVEEAAKTAPGKKRPVEQSPQEPDSSAGIGKSGAQPAKKRLNFGQTGDTESVPDPQPIGEPPAAPSGVGSLTMASGGGAPVADNNEGADGVGSSSGNWHCDSQWLGDRVITTSTRTWALPTYNNHLYKQISNSTSGGSSNDNAYFGYSTPWGYFDFNRFHCHFSPRDWQRLINNNWGFRPKRLNFKLFNIQVKEVTDNNGVKTIANNLTSTVQVFGDSDYQLPYVLGSAHEGCLPPFPADVFMIPQYGYLTLNDGSQAVGRSSFYCLEYFPSQMLRTGNNFQFSYEFENVPFHSSYAHSQSLDRLMNPLIDQYLYYLSKTINGSGQNQQTLKFSVAGPSNMAVQGRNYIPGPSYRQQRVSTTVTQNNNSEIAWPRASSWALNGRNSLMNPGPAMASHKEGEDRFFPLSGSLIFGKQGTGRDNVDADKVMITNEEEIKTTNPVATESYGQVATNHQSAQAQAQTGWVQNQGILPGMVWQDRDVYLQGPIWAKIPHTDGNFHPSPLMGGFGMKHPPPQILIKNTPVPADPPTAFNKDKLNSFITQYSTGQVSVEIEWELQKENSKRWNPEIQYTSNLCKSNNVEFAVNTEGVYSEPRPIGTRYLTRNL

SEQ ID NO: 1145 - protein, 736 aa, synthetic construct
MAADGYLPDWLEDNLSEGIREWWALKPGAPQPKANQQHQDNARGLVLPGYKYLGPGNGLDKGEPVNAVDAAALEHDKAYDQQLKAGDNPYLKYNHADAEFQERLKEDTSFGGNLGRAVFQAKKRLLEPLGLVEEAAKTAPGKKRPVEQSPQEPDSSAGIGKSGAQPAKKRLNFGQTGDTESVPDPQPIGEPPAAPSGVGSLTMASGGGAPVADNNEGADGVGSSSGNWHCDSQWLGDRVITTSTRTWALPTYNNHLYKQISNSTSGGSSNDNAYFGYSTPWGYFDFNRFHCHFSPRDWQRLINNNWGFRPKRLNFKLFNIQVKEVTDNNGVKTIANNLTSTVQVFADSDYQLPYVLGSAHEGCLPPFPADVFMIPQYGYLTLNDGSQAVGRSSFYCLEYFPSQMLRTGNNFQFSYEFENVPFHSSYAHSQSLDRLMNPLIDQYLYYLSKTINGSGQNQQTLKFSVAGPSNMAVQGRNYIPGPSYRQQRVSTTVTQNNNSEFAWPGASSWALNGRNSLMNPGPAMASHKEGEDRFFPLSGSLIFGKQGTGRDNVDADKVMITNEEEIKTTNPVATESYGQVATNHQSAQAQAQTGWVQNQGILPGMVWQDRDVYLQGPIWAKIPHTDGNFHPSPLMGGFGMKHPPPQILIKNTPVPADPPTAFNKDKLNSFITQYSTGQVSVEIEWELQKENSKRWNPEIQYTSNLYKSNNVEFAVNTEGVYSEPRPIGTRYLTRNL

SEQ ID NO: 1146 - protein, 736 aa, synthetic construct
MAADGYLPDWLEDNLSEGIREWWALKPGAPQPKANQQHQDNARGLVLPGYKYLGPGNGLDKGEPVNAVDAAALEHDKAYDQQLKAGDNPYLKYNHADAEFQERLKEDTSFGGNLGRAVFQAKKRLLEPLGLVEEAAKTAPGKKRPVEQSPQEPDSSAGIGKSGAQPAKKRLNFGQTGDTESVPDPQPIGEPPAAPSGVGSLTMASGGGAPVADNNEGADGVGSSSGNWHCDSQWLGDRVITTSTRTWALPTYNNHLYKQISNSTSGGSSNDNAYFGYSTPWGYFDFNRFHCHFSPRDWQRLINNNWGFRPKRLNFKLFNIQVKEVTDNNGVKTIANNLTSTVQVFADSDYQLPYVLGSAHEGCLPPFPADVFMIPQYGYLTLNDGSQAVGRSSFYCLEYFPSQMLRTGNNFQFSYEFENVPFHSSYAHSQSLDRLMNPLIDQYLYYLSKTINGSGQNQQTLKFSVAGPSNMAVQGRNYIPGPSYRQQRVSTTVTQNNNSEIAWPGASSWALNGRNSLMNPGPAMASHKEGEDRFFPLSGSLIFGKQGTGRDNVDADKVMITNEEEIKTTNPVATESYGQVATNHQSAQAQAQTGWVQNQGILPGMVWQDRDVYLQGPIWAKIPHTDGNFHPSPLMGGFGMKHPPPQILIKNTPVPADPPTAFNKDKLNSFITQYSTGQVSVEIEWELQKENSKRWNPEIQYTSNLYKSNNVEFAVNTEGVYSEPRPIGTRYLTRNL

SEQ ID NO: 1147 - protein, 736 aa, synthetic construct
MAADGYLPDWLEDNLSEGIREWWALKPGAPQPKANQQHQDNARGLVLPGYKYLGPGNGLDKGEPVNAVDAAALEHDKAYDQQLKAGDNPYLKYNHADAEFQERLKEDTSFGGNLGRAVFQAKKRLLEPLGLVEEAAKTAPGKKRPVEQSPQEPDSSAGIGKSGAQPAKKRLNFGQTGDTESVPDPQPIGEPPAAPSGVGSLTMASGGGAPVADNNEGADGVGSSSGNWHCDSQWLGDRVITTSTRTWALPTYNNHLYKQISNSTSGGSSNDNAYFGYSTPWGYFDFNRFHCHFSPRDWQRLINNNWGFRPKRLNFKLFNIQVKEVTDNNGVKTIANNLTSTVQVFADSDYQLPYVLGSAHEGCLPPFPADVFMIPQYGYLTLNDGSQAVGRSSFYCLEYFPSQMLRTGNNFQFSYEFENVPFHSSYAHSQSLDRLMNPLIDQYLYYLSKTINGSGQNQQTLKFSVAGPSNMAVQGRNYIPGPSYRQQRVSTTVTQNNNSEFAWPRASSWALNGRNSLMNPGPAMASHKEGEDRFFPLSGSLIFGKQGTGRDNVDADKVMITNEEEIKTTNPVATESYGQVATNHQSAQAQAQTGWVQNQGILPGMVWQDRDVYLQGPIWAKIPHTDGNFHPSPLMGGFGMKHPPPQILIKNTPVPADPPTAFNKDKLNSFITQYSTGQVSVEIEWELQKENSKRWNPEIQYTSNLYKSNNVEFAVNTEGVYSEPRPIGTRYLTRNL

SEQ ID NO: 1148 - protein, 736 aa, synthetic construct
MAADGYLPDWLEDNLSEGIREWWALKPGAPQPKANQQHQDNARGLVLPGYKYLGPGNGLDKGEPVNAVDAAALEHDKAYDQQLKAGDNPYLKYNHADAEFQERLKEDTSFGGNLGRAVFQAKKRLLEPLGLVEEAAKTAPGKKRPVEQSPQEPDSSAGIGKSGAQPAKKRLNFGQTGDTESVPDPQPIGEPPAAPSGVGSLTMASGGGAPVADNNEGADGVGSSSGNWHCDSQWLGDRVITTSTRTWALPTYNNHLYKQISNSTSGGSSNDNAYFGYSTPWGYFDFNRFHCHFSPRDWQRLINNNWGFRPKRLNFKLFNIQVKEVTDNNGVKTIANNLTSTVQVFADSDYQLPYVLGSAHEGCLPPFPADVFMIPQYGYLTLNDGSQAVGRSSFYCLEYFPSQMLRTGNNFQFSYEFENVPFHSSYAHSQSLDRLMNPLIDQYLYYLSKTINGSGQNQQTLKFSVAGPSNMAVQGRNYIPGPSYRQQRVSTTVTQNNNSEFAWPGASSWALNGRNSLMNPGPAMASHKEGEDRFFPLSGSLIFGKQGTGRDNVDADKVMITNEEEIKTTNPVATESYGQVATNHQSAQAQAQTGWVQNQGILPGMVWQDRDVYLQGPIWAKIPHTDGNFHPSPLMGGFGMKHPPPQILIKNTPVPADPPTAFNKDKLNSFITQYSTGQVSVEIEWELQKENSKRWNPEIQYTSNLCKSNNVEFAVNTEGVYSEPRPIGTRYLTRNL

SEQ ID NO: 1149 - protein, 736 aa, synthetic construct
MAADGYLPDWLEDNLSEGIREWWALKPGAPQPKANQQHQDNARGLVLPGYKYLGPGNGLDKGEPVNAVDAAALEHDKAYDQQLKAGDNPYLKYNHADAEFQERLKEDTSFGGNLGRAVFQAKKRLLEPLGLVEEAAKTAPGKKRPVEQSPQEPDSSAGIGKSGAQPAKKRLNFGQTGDTESVPDPQPIGEPPAAPSGVGSLTMASGGGAPVADNNEGADGVGSSSGNWHCDSQWLGDRVITTSTRTWALPTYNNHLYKQISNSTSGGSSNDNAYFGYSTPWGYFDFNRFHCHFSPRDWQRLINNNWGFRPKRLNFKLFNIQVKEVTDNNGVKTIANNLTSTVQVFADSDYQLPYVLGSAHEGCLPPFPADVFMIPQYGYLTLNDGSQAVGRSSFYCLEYFPSQMLRTGNNFQFSYEFENVPFHSSYAHSQSLDRLMNPLIDQYLYYLSKTINGSGQNQQTLKFSVAGPSNMAVQGRNYIPGPSYRQQRVSTTVTQNNNSEIAWPRASSWALNGRNSLMNPGPAMASHKEGEDRFFPLSGSLIFGKQGTGRDNVDADKVMITNEEEIKTTNPVATESYGQVATNHQSAQAQAQTGWVQNQGILPGMVWQDRDVYLQGPIWAKIPHTDGNFHPSPLMGGFGMKHPPPQILIKNTPVPADPPTAFNKDKLNSFITQYSTGQVSVEIEWELQKENSKRWNPEIQYTSNLYKSNNVEFAVNTEGVYSEPRPIGTRYLTRNL

SEQ ID NO: 1150 - protein, 736 aa, synthetic construct
MAADGYLPDWLEDNLSEGIREWWALKPGAPQPKANQQHQDNARGLVLPGYKYLGPGNGLDKGEPVNAVDAAALEHDKAYDQQLKAGDNPYLKYNHADAEFQERLKEDTSFGGNLGRAVFQAKKRLLEPLGLVEEAAKTAPGKKRPVEQSPQEPDSSAGIGKSGAQPAKKRLNFGQTGDTESVPDPQPIGEPPAAPSGVGSLTMASGGGAPVADNNEGADGVGSSSGNWHCDSQWLGDRVITTSTRTWALPTYNNHLYKQISNSTSGGSSNDNAYFGYSTPWGYFDFNRFHCHFSPRDWQRLINNNWGFRPKRLNFKLFNIQVKEVTDNNGVKTIANNLTSTVQVFADSDYQLPYVLGSAHEGCLPPFPADVFMIPQYGYLTLNDGSQAVGRSSFYCLEYFPSQMLRTGNNFQFSYEFENVPFHSSYAHSQSLDRLMNPLIDQYLYYLSKTINGSGQNQQTLKFSVAGPSNMAVQGRNYIPGPSYRQQRVSTTVTQNNNSEIAWPGASSWALNGRNSLMNPGPAMASHKEGEDRFFPLSGSLIFGKQGTGRDNVDADKVMITNEEEIKTTNPVATESYGQVATNHQSAQAQAQTGWVQNQGILPGMVWQDRDVYLQGPIWAKIPHTDGNFHPSPLMGGFGMKHPPPQILIKNTPVPADPPTAFNKDKLNSFITQYSTGQVSVEIEWELQKENSKRWNPEIQYTSNLCKSNNVEFAVNTEGVYSEPRPIGTRYLTRNL

SEQ ID NO: 1151 - protein, 736 aa, synthetic construct
MAADGYLPDWLEDNLSEGIREWWALKPGAPQPKANQQHQDNARGLVLPGYKYLGPGNGLDKGEPVNAVDAAALEHDKAYDQQLKAGDNPYLKYNHADAEFQERLKEDTSFGGNLGRAVFQAKKRLLEPLGLVEEAAKTAPGKKRPVEQSPQEPDSSAGIGKSGAQPAKKRLNFGQTGDTESVPDPQPIGEPPAAPSGVGSLTMASGGGAPVADNNEGADGVGSSSGNWHCDSQWLGDRVITTSTRTWALPTYNNHLYKQISNSTSGGSSNDNAYFGYSTPWGYFDFNRFHCHFSPRDWQRLINNNWGFRPKRLNFKLFNIQVKEVTDNNGVKTIANNLTSTVQVFADSDYQLPYVLGSAHEGCLPPFPADVFMIPQYGYLTLNDGSQAVGRSSFYCLEYFPSQMLRTGNNFQFSYEFENVPFHSSYAHSQSLDRLMNPLIDQYLYYLSKTINGSGQNQQTLKFSVAGPSNMAVQGRNYIPGPSYRQQRVSTTVTQNNNSEFAWPRASSWALNGRNSLMNPGPAMASHKEGEDRFFPLSGSLIFGKQGTGRDNVDADKVMITNEEEIKTTNPVATESYGQVATNHQSAQAQAQTGWVQNQGILPGMVWQDRDVYLQGPIWAKIPHTDGNFHPSPLMGGFGMKHPPPQILIKNTPVPADPPTAFNKDKLNSFITQYSTGQVSVEIEWELQKENSKRWNPEIQYTSNLCKSNNVEFAVNTEGVYSEPRPIGTRYLTRNL

SEQ ID NO: 1152 - protein, 736 aa, synthetic construct
MAADGYLPDWLEDNLSEGIREWWALKPGAPQPKANQQHQDNARGLVLPGYKYLGPGNGLDKGEPVNAVDAAALEHDKAYDQQLKAGDNPYLKYNHADAEFQERLKEDTSFGGNLGRAVFQAKKRLLEPLGLVEEAAKTAPGKKRPVEQSPQEPDSSAGIGKSGAQPAKKRLNFGQTGDTESVPDPQPIGEPPAAPSGVGSLTMASGGGAPVADNNEGADGVGSSSGNWHCDSQWLGDRVITTSTRTWALPTYNNHLYKQISNSTSGGSSNDNAYFGYSTPWGYFDFNRFHCHFSPRDWQRLINNNWGFRPKRLNFKLFNIQVKEVTDNNGVKTIANNLTSTVQVFADSDYQLPYVLGSAHEGCLPPFPADVFMIPQYGYLTLNDGSQAVGRSSFYCLEYFPSQMLRTGNNFQFSYEFENVPFHSSYAHSQSLDRLMNPLIDQYLYYLSKTINGSGQNQQTLKFSVAGPSNMAVQGRNYIPGPSYRQQRVSTTVTQNNNSEIAWPRASSWALNGRNSLMNPGPAMASHKEGEDRFFPLSGSLIFGKQGTGRDNVDADKVMITNEEEIKTTNPVATESYGQVATNHQSAQAQAQTGWVQNQGILPGMVWQDRDVYLQGPIWAKIPHTDGNFHPSPLMGGFGMKHPPPQILIKNTPVPADPPTAFNKDKLNSFITQYSTGQVSVEIEWELQKENSKRWNPEIQYTSNLCKSNNVEFAVNTEGVYSEPRPIGTRYLTRNL

SEQ ID NO: 1153 - protein, 736 aa, synthetic construct
MAADGYLPDWLEDNLSEGIREWWALKPGAPQPKANQQHQDNARGLVLPGYKYLGPGNGLDKGEPVNAADAAALEHDKAYDQQLKAGDNPYLKYNHADAEFQERLKEDTSFGGNLGRAVFQAKKRLLEPLGLVEEAAKTAPGKKRPVEQSPREPDSSAGIGKSGAQPAKKRLNFGQTGDTESVPDPQPIGEPPAAPSGVGSLTMASGGGAPVADNNEGADGVGSSSGNWHCDSQWLGDRVITTSTRTWALPTYNNHLYKQISNSTSGGSSNDNAYFGYSTPWGYFDFNRFHCHFSPRDWQRLINNNWGFRPKRLNFKLFNIQVKEVTDNNGVKTIANNLTSTVQVFGDSDYQLPYVLGSAHEGCLPPFPADVFMIPQYGYLTLNDGSQAVGRSSFYCLEYFPSQMLRTGNNFQFSYEFENVPFHSSYAHSQSLDRLMNPLIDQYLYYLSKTINGSGQNQQTLKFSVAGPSNMAVQGRNYIPGPSYRQQRVSTTVTQNNNSEFAWPGASSWALNGRNSLMNPGPAMASHKEGEDRFFPLSGSLIFGKQGTGRDNVDADKVMITNEEEIKTTNPVATESYGQVATNHQSAQAQAQTGWVQNQGILPGMVWQDRDVYLQGPIWAKIPHTDGNFHPSPLMGGFGMKHPPPQILIKNTPVPADPPTAFNKDKLNSFITQYSTGQVSVEIEWELQKENSKRWNPEIQYTSNYYKSNNVEFAVNTEGVYSEPRPIGTRYLTRNL

SEQ ID NO: 1154 - protein, 736 aa, synthetic construct
MAADGYLPDWLEDNLSEGIREWWALKPGAPQPKANQQHQDNARGLVLPGYKYLGPGNGLDKGEPVNAADAAALEHDKAYDQQLKAGDNPYLKYNHADAEFQERLKEDTSFGGNLGRAVFQAKKRLLEPLGLVEEAAKTAPGKKRPVEQSPREPDSSAGIGKSGAQPAKKRLNFGQTGDTESVPDPQPIGEPPAAPSGVGSLTMASGGGAPVADNNEGADGVGSSSGNWHCDSQWLGDRVITTSTRTWALPTYNNHLYKQISNSTSGGSSNDNAYFGYSTPWGYFDFNRFHCHFSPRDWQRLINNNWGFRPKRLNFKLFNIQVKEVTDNNGVKTIANNLTSTVQVFGDSDYQLPYVLGSAHEGCLPPFPADVFMIPQYGYLTLNDGSQAVGRSSFYCLEYFPSQMLRTGNNFQFSYEFENVPFHSSYAHSQSLDRLMNPLIDQYLYYLSKTINGSGQNQQTLKFSVAGPSNMAVQGRNYIPGPSYRQQRVSTTVTQNNNSEIAWPGASSWALNGRNSLMNPGPAMASHKEGEDRFFPLSGSLIFGKQGTGRDNVDADKVMITNEEEIKTTNPVATESYGQVATNHQSAQAQAQTGWVQNQGILPGMVWQDRDVYLQGPIWAKIPHTDGNFHPSPLMGGFGMKHPPPQILIKNTPVPADPPTAFNKDKLNSFITQYSTGQVSVEIEWELQKENSKRWNPEIQYTSNYYKSNNVEFAVNTEGVYSEPRPIGTRYLTRNL

SEQ ID NO: 1155 - protein, 736 aa, synthetic construct
MAADGYLPDWLEDNLSEGIREWWALKPGAPQPKANQQHQDNARGLVLPGYKYLGPGNGLDKGEPVNAADAAALEHDKAYDQQLKAGDNPYLKYNHADAEFQERLKEDTSFGGNLGRAVFQAKKRLLEPLGLVEEAAKTAPGKKRPVEQSPREPDSSAGIGKSGAQPAKKRLNFGQTGDTESVPDPQPIGEPPAAPSGVGSLTMASGGGAPVADNNEGADGVGSSSGNWHCDSQWLGDRVITTSTRTWALPTYNNHLYKQISNSTSGGSSNDNAYFGYSTPWGYFDFNRFHCHFSPRDWQRLINNNWGFRPKRLNFKLFNIQVKEVTDNNGVKTIANNLTSTVQVFGDSDYQLPYVLGSAHEGCLPPFPADVFMIPQYGYLTLNDGSQAVGRSSFYCLEYFPSQMLRTGNNFQFSYEFENVPFHSSYAHSQSLDRLMNPLIDQYLYYLSKTINGSGQNQQTLKFSVAGPSNMAVQGRNYIPGPSYRQQRVSTTVTQNNNSEFAWPRASSWALNGRNSLMNPGPAMASHKEGEDRFFPLSGSLIFGKQGTGRDNVDADKVMITNEEEIKTTNPVATESYGQVATNHQSAQAQAQTGWVQNQGILPGMVWQDRDVYLQGPIWAKIPHTDGNFHPSPLMGGFGMKHPPPQILIKNTPVPADPPTAFNKDKLNSFITQYSTGQVSVEIEWELQKENSKRWNPEIQYTSNYYKSNNVEFAVNTEGVYSEPRPIGTRYLTRNL

SEQ ID NO: 1156 - protein, 736 aa, synthetic construct
MAADGYLPDWLEDNLSEGIREWWALKPGAPQPKANQQHQDNARGLVLPGYKYLGPGNGLDKGEPVNAADAAALEHDKAYDQQLKAGDNPYLKYNHADAEFQERLKEDTSFGGNLGRAVFQAKKRLLEPLGLVEEAAKTAPGKKRPVEQSPREPDSSAGIGKSGAQPAKKRLNFGQTGDTESVPDPQPIGEPPAAPSGVGSLTMASGGGAPVADNNEGADGVGSSSGNWHCDSQWLGDRVITTSTRTWALPTYNNHLYKQISNSTSGGSSNDNAYFGYSTPWGYFDFNRFHCHFSPRDWQRLINNNWGFRPKRLNFKLFNIQVKEVTDNNGVKTIANNLTSTVQVFGDSDYQLPYVLGSAHEGCLPPFPADVFMIPQYGYLTLNDGSQAVGRSSFYCLEYFPSQMLRTGNNFQFSYEFENVPFHSSYAHSQSLDRLMNPLIDQYLYYLSKTINGSGQNQQTLKFSVAGPSNMAVQGRNYIPGPSYRQQRVSTTVTQNNNSEFAWPGASSWALNGRNSLMNPGPAMASHKEGEDRFFPLSGSLIFGKQGTGRDNVDADKVMITNEEEIKTTNPVATESYGQVATNHQSAQAQAQTGWVQNQGILPGMVWQDRDVYLQGPIWAKIPHTDGNFHPSPLMGGFGMKHPPPQILIKNTPVPADPPTAFNKDKLNSFITQYSTGQVSVEIEWELQKENSKRWNPEIQYTSNYCKSNNVEFAVNTEGVYSEPRPIGTRYLTRNL

SEQ ID NO: 1157 - protein, 736 aa, synthetic construct
MAADGYLPDWLEDNLSEGIREWWALKPGAPQPKANQQHQDNARGLVLPGYKYLGPGNGLDKGEPVNAADAAALEHDKAYDQQLKAGDNPYLKYNHADAEFQERLKEDTSFGGNLGRAVFQAKKRLLEPLGLVEEAAKTAPGKKRPVEQSPREPDSSAGIGKSGAQPAKKRLNFGQTGDTESVPDPQPIGEPPAAPSGVGSLTMASGGGAPVADNNEGADGVGSSSGNWHCDSQWLGDRVITTSTRTWALPTYNNHLYKQISNSTSGGSSNDNAYFGYSTPWGYFDFNRFHCHFSPRDWQRLINNNWGFRPKRLNFKLFNIQVKEVTDNNGVKTIANNLTSTVQVFGDSDYQLPYVLGSAHEGCLPPFPADVFMIPQYGYLTLNDGSQAVGRSSFYCLEYFPSQMLRTGNNFQFSYEFENVPFHSSYAHSQSLDRLMNPLIDQYLYYLSKTINGSGQNQQTLKFSVAGPSNMAVQGRNYIPGPSYRQQRVSTTVTQNNNSEIAWPRASSWALNGRNSLMNPGPAMASHKEGEDRFFPLSGSLIFGKQGTGRDNVDADKVMITNEEEIKTTNPVATESYGQVATNHQSAQAQAQTGWVQNQGILPGMVWQDRDVYLQGPIWAKIPHTDGNFHPSPLMGGFGMKHPPPQILIKNTPVPADPPTAFNKDKLNSFITQYSTGQVSVEIEWELQKENSKRWNPEIQYTSNYYKSNNVEFAVNTEGVYSEPRPIGTRYLTRNL

SEQ ID NO: 1158 - protein, 736 aa, synthetic construct
MAADGYLPDWLEDNLSEGIREWWALKPGAPQPKANQQHQDNARGLVLPGYKYLGPGNGLDKGEPVNAADAAALEHDKAYDQQLKAGDNPYLKYNHADAEFQERLKEDTSFGGNLGRAVFQAKKRLLEPLGLVEEAAKTAPGKKRPVEQSPREPDSSAGIGKSGAQPAKKRLNFGQTGDTESVPDPQPIGEPPAAPSGVGSLTMASGGGAPVADNNEGADGVGSSSGNWHCDSQWLGDRVITTSTRTWALPTYNNHLYKQISNSTSGGSSNDNAYFGYSTPWGYFDFNRFHCHFSPRDWQRLINNNWGFRPKRLNFKLFNIQVKEVTDNNGVKTIANNLTSTVQVFGDSDYQLPYVLGSAHEGCLPPFPADVFMIPQYGYLTLNDGSQAVGRSSFYCLEYFPSQMLRTGNNFQFSYEFENVPFHSSYAHSQSLDRLMNPLIDQYLYYLSKTINGSGQNQQTLKFSVAGPSNMAVQGRNYIPGPSYRQQRVSTTVTQNNNSEIAWPGASSWALNGRNSLMNPGPAMASHKEGEDRFFPLSGSLIFGKQGTGRDNVDADKVMITNEEEIKTTNPVATESYGQVATNHQSAQAQAQTGWVQNQGILPGMVWQDRDVYLQGPIWAKIPHTDGNFHPSPLMGGFGMKHPPPQILIKNTPVPADPPTAFNKDKLNSFITQYSTGQVSVEIEWELQKENSKRWNPEIQYTSNYCKSNNVEFAVNTEGVYSEPRPIGTRYLTRNL

SEQ ID NO: 1159 - protein, 736 aa, synthetic construct
MAADGYLPDWLEDNLSEGIREWWALKPGAPQPKANQQHQDNARGLVLPGYKYLGPGNGLDKGEPVNAADAAALEHDKAYDQQLKAGDNPYLKYNHADAEFQERLKEDTSFGGNLGRAVFQAKKRLLEPLGLVEEAAKTAPGKKRPVEQSPREPDSSAGIGKSGAQPAKKRLNFGQTGDTESVPDPQPIGEPPAAPSGVGSLTMASGGGAPVADNNEGADGVGSSSGNWHCDSQWLGDRVITTSTRTWALPTYNNHLYKQISNSTSGGSSNDNAYFGYSTPWGYFDFNRFHCHFSPRDWQRLINNNWGFRPKRLNFKLFNIQVKEVTDNNGVKTIANNLTSTVQVFGDSDYQLPYVLGSAHEGCLPPFPADVFMIPQYGYLTLNDGSQAVGRSSFYCLEYFPSQMLRTGNNFQFSYEFENVPFHSSYAHSQSLDRLMNPLIDQYLYYLSKTINGSGQNQQTLKFSVAGPSNMAVQGRNYIPGPSYRQQRVSTTVTQNNNSEFAWPRASSWALNGRNSLMNPGPAMASHKEGEDRFFPLSGSLIFGKQGTGRDNVDADKVMITNEEEIKTTNPVATESYGQVATNHQSAQAQAQTGWVQNQGILPGMVWQDRDVYLQGPIWAKIPHTDGNFHPSPLMGGFGMKHPPPQILIKNTPVPADPPTAFNKDKLNSFITQYSTGQVSVEIEWELQKENSKRWNPEIQYTSNYCKSNNVEFAVNTEGVYSEPRPIGTRYLTRNL

SEQ ID NO: 1160 - protein, 736 aa, synthetic construct
MAADGYLPDWLEDNLSEGIREWWALKPGAPQPKANQQHQDNARGLVLPGYKYLGPGNGLDKGEPVNAADAAALEHDKAYDQQLKAGDNPYLKYNHADAEFQERLKEDTSFGGNLGRAVFQAKKRLLEPLGLVEEAAKTAPGKKRPVEQSPREPDSSAGIGKSGAQPAKKRLNFGQTGDTESVPDPQPIGEPPAAPSGVGSLTMASGGGAPVADNNEGADGVGSSSGNWHCDSQWLGDRVITTSTRTWALPTYNNHLYKQISNSTSGGSSNDNAYFGYSTPWGYFDFNRFHCHFSPRDWQRLINNNWGFRPKRLNFKLFNIQVKEVTDNNGVKTIANNLTSTVQVFGDSDYQLPYVLGSAHEGCLPPFPADVFMIPQYGYLTLNDGSQAVGRSSFYCLEYFPSQMLRTGNNFQFSYEFENVPFHSSYAHSQSLDRLMNPLIDQYLYYLSKTINGSGQNQQTLKFSVAGPSNMAVQGRNYIPGPSYRQQRVSTTVTQNNNSEIAWPRASSWALNGRNSLMNPGPAMASHKEGEDRFFPLSGSLIFGKQGTGRDNVDADKVMITNEEEIKTTNPVATESYGQVATNHQSAQAQAQTGWVQNQGILPGMVWQDRDVYLQGPIWAKIPHTDGNFHPSPLMGGFGMKHPPPQILIKNTPVPADPPTAFNKDKLNSFITQYSTGQVSVEIEWELQKENSKRWNPEIQYTSNYCKSNNVEFAVNTEGVYSEPRPIGTRYLTRNL

SEQ ID NO: 1161 - protein, 736 aa, synthetic construct
MAADGYLPDWLEDNLSEGIREWWALKPGAPQPKANQQHQDNARGLVLPGYKYLGPGNGLDKGEPVNAADAAALEHDKAYDQQLKAGDNPYLKYNHADAEFQERLKEDTSFGGNLGRAVFQAKKRLLEPLGLVEEAAKTAPGKKRPVEQSPREPDSSAGIGKSGAQPAKKRLNFGQTGDTESVPDPQPIGEPPAAPSGVGSLTMASGGGAPVADNNEGADGVGSSSGNWHCDSQWLGDRVITTSTRTWALPTYNNHLYKQISNSTSGGSSNDNAYFGYSTPWGYFDFNRFHCHFSPRDWQRLINNNWGFRPKRLNFKLFNIQVKEVTDNNGVKTIANNLTSTVQVFTDSDYQLPYVLGSAHEGCLPPFPADVFMIPQYGYLTLNDGSQAVGRSSFYCLEYFPSQMLRTGNNFQFSYEFENVPFHSSYAHSQSLDRLMNPLIDQYLYYLSKTINGSGQNQQTLKFSVAGPSNMAVQGRNYIPGPSYRQQRVSTTVTQNNNSEFAWPGASSWALNGRNSLMNPGPAMASHKEGEDRFFPLSGSLIFGKQGTGRDNVDADKVMITNEEEIKTTNPVATESYGQVATNHQSAQAQAQTGWVQNQGILPGMVWQDRDVYLQGPIWAKIPHTDGNFHPSPLMGGFGMKHPPPQILIKNTPVPADPPTAFNKDKLNSFITQYSTGQVSVEIEWELQKENSKRWNPEIQYTSNLYKSNNVEFAVNTEGVYSEPRPIGTRYLTRNL

SEQ ID NO: 1162 - protein, 736 aa, synthetic construct
MAADGYLPDWLEDNLSEGIREWWALKPGAPQPKANQQHQDNARGLVLPGYKYLGPGNGLDKGEPVNAADAAALEHDKAYDQQLKAGDNPYLKYNHADAEFQERLKEDTSFGGNLGRAVFQAKKRLLEPLGLVEEAAKTAPGKKRPVEQSPREPDSSAGIGKSGAQPAKKRLNFGQTGDTESVPDPQPIGEPPAAPSGVGSLTMASGGGAPVADNNEGADGVGSSSGNWHCDSQWLGDRVITTSTRTWALPTYNNHLYKQISNSTSGGSSNDNAYFGYSTPWGYFDFNRFHCHFSPRDWQRLINNNWGFRPKRLNFKLFNIQVKEVTDNNGVKTIANNLTSTVQVFTDSDYQLPYVLGSAHEGCLPPFPADVFMIPQYGYLTLNDGSQAVGRSSFYCLEYFPSQMLRTGNNFQFSYEFENVPFHSSYAHSQSLDRLMNPLIDQYLYYLSKTINGSGQNQQTLKFSVAGPSNMAVQGRNYIPGPSYRQQRVSTTVTQNNNSEIAWPGASSWALNGRNSLMNPGPAMASHKEGEDRFFPLSGSLIFGKQGTGRDNVDADKVMITNEEEIKTTNPVATESYGQVATNHQSAQAQAQTGWVQNQGILPGMVWQDRDVYLQGPIWAKIPHTDGNFHPSPLMGGFGMKHPPPQILIKNTPVPADPPTAFNKDKLNSFITQYSTGQVSVEIEWELQKENSKRWNPEIQYTSNLYKSNNVEFAVNTEGVYSEPRPIGTRYLTRNL

SEQ ID NO: 1163 - protein, 736 aa, synthetic construct
MAADGYLPDWLEDNLSEGIREWWALKPGAPQPKANQQHQDNARGLVLPGYKYLGPGNGLDKGEPVNAADAAALEHDKAYDQQLKAGDNPYLKYNHADAEFQERLKEDTSFGGNLGRAVFQAKKRLLEPLGLVEEAAKTAPGKKRPVEQSPREPDSSAGIGKSGAQPAKKRLNFGQTGDTESVPDPQPIGEPPAAPSGVGSLTMASGGGAPVADNNEGADGVGSSSGNWHCDSQWLGDRVITTSTRTWALPTYNNHLYKQISNSTSGGSSNDNAYFGYSTPWGYFDFNRFHCHFSPRDWQRLINNNWGFRPKRLNFKLFNIQVKEVTDNNGVKTIANNLTSTVQVFTDSDYQLPYVLGSAHEGCLPPFPADVFMIPQYGYLTLNDGSQAVGRSSFYCLEYFPSQMLRTGNNFQFSYEFENVPFHSSYAHSQSLDRLMNPLIDQYLYYLSKTINGSGQNQQTLKFSVAGPSNMAVQGRNYIPGPSYRQQRVSTTVTQNNNSEFAWPRASSWALNGRNSLMNPGPAMASHKEGEDRFFPLSGSLIFGKQGTGRDNVDADKVMITNEEEIKTTNPVATESYGQVATNHQSAQAQAQTGWVQNQGILPGMVWQDRDVYLQGPIWAKIPHTDGNFHPSPLMGGFGMKHPPPQILIKNTPVPADPPTAFNKDKLNSFITQYSTGQVSVEIEWELQKENSKRWNPEIQYTSNLYKSNNVEFAVNTEGVYSEPRPIGTRYLTRNL

SEQ ID NO: 1164 - protein, 736 aa, synthetic construct
MAADGYLPDWLEDNLSEGIREWWALKPGAPQPKANQQHQDNARGLVLPGYKYLGPGNGLDKGEPVNAADAAALEHDKAYDQQLKAGDNPYLKYNHADAEFQERLKEDTSFGGNLGRAVFQAKKRLLEPLGLVEEAAKTAPGKKRPVEQSPREPDSSAGIGKSGAQPAKKRLNFGQTGDTESVPDPQPIGEPPAAPSGVGSLTMASGGGAPVADNNEGADGVGSSSGNWHCDSQWLGDRVITTSTRTWALPTYNNHLYKQISNSTSGGSSNDNAYFGYSTPWGYFDFNRFHCHFSPRDWQRLINNNWGFRPKRLNFKLFNIQVKEVTDNNGVKTIANNLTSTVQVFTDSDYQLPYVLGSAHEGCLPPFPADVFMIPQYGYLTLNDGSQAVGRSSFYCLEYFPSQMLRTGNNFQFSYEFENVPFHSSYAHSQSLDRLMNPLIDQYLYYLSKTINGSGQNQQTLKFSVAGPSNMAVQGRNYIPGPSYRQQRVSTTVTQNNNSEFAWPGASSWALNGRNSLMNPGPAMASHKEGEDRFFPLSGSLIFGKQGTGRDNVDADKVMITNEEEIKTTNPVATESYGQVATNHQSAQAQAQTGWVQNQGILPGMVWQDRDVYLQGPIWAKIPHTDGNFHPSPLMGGFGMKHPPPQILIKNTPVPADPPTAFNKDKLNSFITQYSTGQVSVEIEWELQKENSKRWNPEIQYTSNLCKSNNVEFAVNTEGVYSEPRPIGTRYLTRNL

SEQ ID NO: 1165 - protein, 736 aa, synthetic construct
MAADGYLPDWLEDNLSEGIREWWALKPGAPQPKANQQHQDNARGLVLPGYKYLGPGNGLDKGEPVNAADAAALEHDKAYDQQLKAGDNPYLKYNHADAEFQERLKEDTSFGGNLGRAVFQAKKRLLEPLGLVEEAAKTAPGKKRPVEQSPREPDSSAGIGKSGAQPAKKRLNFGQTGDTESVPDPQPIGEPPAAPSGVGSLTMASGGGAPVADNNEGADGVGSSSGNWHCDSQWLGDRVITTSTRTWALPTYNNHLYKQISNSTSGGSSNDNAYFGYSTPWGYFDFNRFHCHFSPRDWQRLINNNWGFRPKRLNFKLFNIQVKEVTDNNGVKTIANNLTSTVQVFTDSDYQLPYVLGSAHEGCLPPFPADVFMIPQYGYLTLNDGSQAVGRSSFYCLEYFPSQMLRTGNNFQFSYEFENVPFHSSYAHSQSLDRLMNPLIDQYLYYLSKTINGSGQNQQTLKFSVAGPSNMAVQGRNYIPGPSYRQQRVSTTVTQNNNSEIAWPRASSWALNGRNSLMNPGPAMASHKEGEDRFFPLSGSLIFGKQGTGRDNVDADKVMITNEEEIKTTNPVATESYGQVATNHQSAQAQAQTGWVQNQGILPGMVWQDRDVYLQGPIWAKIPHTDGNFHPSPLMGGFGMKHPPPQILIKNTPVPADPPTAFNKDKLNSFITQYSTGQVSVEIEWELQKENSKRWNPEIQYTSNLYKSNNVEFAVNTEGVYSEPRPIGTRYLTRNL

SEQ ID NO: 1166 - protein, 736 aa, synthetic construct
MAADGYLPDWLEDNLSEGIREWWALKPGAPQPKANQQHQDNARGLVLPGYKYLGPGNGLDKGEPVNAADAAALEHDKAYDQQLKAGDNPYLKYNHADAEFQERLKEDTSFGGNLGRAVFQAKKRLLEPLGLVEEAAKTAPGKKRPVEQSPREPDSSAGIGKSGAQPAKKRLNFGQTGDTESVPDPQPIGEPPAAPSGVGSLTMASGGGAPVADNNEGADGVGSSSGNWHCDSQWLGDRVITTSTRTWALPTYNNHLYKQISNSTSGGSSNDNAYFGYSTPWGYFDFNRFHCHFSPRDWQRLINNNWGFRPKRLNFKLFNIQVKEVTDNNGVKTIANNLTSTVQVFTDSDYQLPYVLGSAHEGCLPPFPADVFMIPQYGYLTLNDGSQAVGRSSFYCLEYFPSQMLRTGNNFQFSYEFENVPFHSSYAHSQSLDRLMNPLIDQYLYYLSKTINGSGQNQQTLKFSVAGPSNMAVQGRNYIPGPSYRQQRVSTTVTQNNNSEIAWPGASSWALNGRNSLMNPGPAMASHKEGEDRFFPLSGSLIFGKQGTGRDNVDADKVMITNEEEIKTTNPVATESYGQVATNHQSAQAQAQTGWVQNQGILPGMVWQDRDVYLQGPIWAKIPHTDGNFHPSPLMGGFGMKHPPPQILIKNTPVPADPPTAFNKDKLNSFITQYSTGQVSVEIEWELQKENSKRWNPEIQYTSNLCKSNNVEFAVNTEGVYSEPRPIGTRYLTRNL

SEQ ID NO: 1167 - protein, 736 aa, synthetic construct
MAADGYLPDWLEDNLSEGIREWWALKPGAPQPKANQQHQDNARGLVLPGYKYLGPGNGLDKGEPVNAADAAALEHDKAYDQQLKAGDNPYLKYNHADAEFQERLKEDTSFGGNLGRAVFQAKKRLLEPLGLVEEAAKTAPGKKRPVEQSPREPDSSAGIGKSGAQPAKKRLNFGQTGDTESVPDPQPIGEPPAAPSGVGSLTMASGGGAPVADNNEGADGVGSSSGNWHCDSQWLGDRVITTSTRTWALPTYNNHLYKQISNSTSGGSSNDNAYFGYSTPWGYFDFNRFHCHFSPRDWQRLINNNWGFRPKRLNFKLFNIQVKEVTDNNGVKTIANNLTSTVQVFTDSDYQLPYVLGSAHEGCLPPFPADVFMIPQYGYLTLNDGSQAVGRSSFYCLEYFPSQMLRTGNNFQFSYEFENVPFHSSYAHSQSLDRLMNPLIDQYLYYLSKTINGSGQNQQTLKFSVAGPSNMAVQGRNYIPGPSYRQQRVSTTVTQNNNSEFAWPRASSWALNGRNSLMNPGPAMASHKEGEDRFFPLSGSLIFGKQGTGRDNVDADKVMITNEEEIKTTNPVATESYGQVATNHQSAQAQAQTGWVQNQGILPGMVWQDRDVYLQGPIWAKIPHTDGNFHPSPLMGGFGMKHPPPQILIKNTPVPADPPTAFNKDKLNSFITQYSTGQVSVEIEWELQKENSKRWNPEIQYTSNLCKSNNVEFAVNTEGVYSEPRPIGTRYLTRNL

SEQ ID NO: 1168 - protein, 736 aa, synthetic construct
MAADGYLPDWLEDNLSEGIREWWALKPGAPQPKANQQHQDNARGLVLPGYKYLGPGNGLDKGEPVNAADAAALEHDKAYDQQLKAGDNPYLKYNHADAEFQERLKEDTSFGGNLGRAVFQAKKRLLEPLGLVEEAAKTAPGKKRPVEQSPREPDSSAGIGKSGAQPAKKRLNFGQTGDTESVPDPQPIGEPPAAPSGVGSLTMASGGGAPVADNNEGADGVGSSSGNWHCDSQWLGDRVITTSTRTWALPTYNNHLYKQISNSTSGGSSNDNAYFGYSTPWGYFDFNRFHCHFSPRDWQRLINNNWGFRPKRLNFKLFNIQVKEVTDNNGVKTIANNLTSTVQVFTDSDYQLPYVLGSAHEGCLPPFPADVFMIPQYGYLTLNDGSQAVGRSSFYCLEYFPSQMLRTGNNFQFSYEFENVPFHSSYAHSQSLDRLMNPLIDQYLYYLSKTINGSGQNQQTLKFSVAGPSNMAVQGRNYIPGPSYRQQRVSTTVTQNNNSEIAWPRASSWALNGRNSLMNPGPAMASHKEGEDRFFPLSGSLIFGKQGTGRDNVDADKVMITNEEEIKTTNPVATESYGQVATNHQSAQAQAQTGWVQNQGILPGMVWQDRDVYLQGPIWAKIPHTDGNFHPSPLMGGFGMKHPPPQILIKNTPVPADPPTAFNKDKLNSFITQYSTGQVSVEIEWELQKENSKRWNPEIQYTSNLCKSNNVEFAVNTEGVYSEPRPIGTRYLTRNL

SEQ ID NO: 1169 - protein, 736 aa, synthetic construct
MAADGYLPDWLEDNLSEGIREWWALKPGAPQPKANQQHQDNARGLVLPGYKYLGPGNGLDKGEPVNAADAAALEHDKAYDQQLKAGDNPYLKYNHADAEFQERLKEDTSFGGNLGRAVFQAKKRLLEPLGLVEEAAKTAPGKKRPVEQSPREPDSSAGIGKSGAQPAKKRLNFGQTGDTESVPDPQPIGEPPAAPSGVGSLTMASGGGAPVADNNEGADGVGSSSGNWHCDSQWLGDRVITTSTRTWALPTYNNHLYKQISNSTSGGSSNDNAYFGYSTPWGYFDFNRFHCHFSPRDWQRLINNNWGFRPKRLNFKLFNIQVKEVTDNNGVKTIANNLTSTVQVFGDSDYQLPYVLGSAHEGCLPPFPADVFMIPQYGYLTLNDGSQAVGRSSFYCLEYFPSQMLRTGNNFQFSYEFENVPFHSSYAHSQSLDRLMNPLIDQYLYYLSKTINGSGQNQQTLKFSVAGPSNMAVQGRNYIPGPSYRQQRVSTTVTQNNNSEFAWPGASSWALNGRNSLMNPGPAMASHKEGEDRFFPLSGSLIFGKQGTGRDNVDADKVMITNEEEIKTTNPVATESYGQVATNHQSAQAQAQTGWVQNQGILPGMVWQDRDVYLQGPIWAKIPHTDGNFHPSPLMGGFGMKHPPPQILIKNTPVPADPPTAFNKDKLNSFITQYSTGQVSVEIEWELQKENSKRWNPEIQYTSNLYKSNNVEFAVNTEGVYSEPRPIGTRYLTRNL

SEQ ID NO: 1170 - protein, 736 aa, synthetic construct
MAADGYLPDWLEDNLSEGIREWWALKPGAPQPKANQQHQDNARGLVLPGYKYLGPGNGLDKGEPVNAADAAALEHDKAYDQQLKAGDNPYLKYNHADAEFQERLKEDTSFGGNLGRAVFQAKKRLLEPLGLVEEAAKTAPGKKRPVEQSPREPDSSAGIGKSGAQPAKKRLNFGQTGDTESVPDPQPIGEPPAAPSGVGSLTMASGGGAPVADNNEGADGVGSSSGNWHCDSQWLGDRVITTSTRTWALPTYNNHLYKQISNSTSGGSSNDNAYFGYSTPWGYFDFNRFHCHFSPRDWQRLINNNWGFRPKRLNFKLFNIQVKEVTDNNGVKTIANNLTSTVQVFGDSDYQLPYVLGSAHEGCLPPFPADVFMIPQYGYLTLNDGSQAVGRSSFYCLEYFPSQMLRTGNNFQFSYEFENVPFHSSYAHSQSLDRLMNPLIDQYLYYLSKTINGSGQNQQTLKFSVAGPSNMAVQGRNYIPGPSYRQQRVSTTVTQNNNSEIAWPGASSWALNGRNSLMNPGPAMASHKEGEDRFFPLSGSLIFGKQGTGRDNVDADKVMITNEEEIKTTNPVATESYGQVATNHQSAQAQAQTGWVQNQGILPGMVWQDRDVYLQGPIWAKIPHTDGNFHPSPLMGGFGMKHPPPQILIKNTPVPADPPTAFNKDKLNSFITQYSTGQVSVEIEWELQKENSKRWNPEIQYTSNLYKSNNVEFAVNTEGVYSEPRPIGTRYLTRNL

SEQ ID NO: 1171 - protein, 736 aa, synthetic construct
MAADGYLPDWLEDNLSEGIREWWALKPGAPQPKANQQHQDNARGLVLPGYKYLGPGNGLDKGEPVNAADAAALEHDKAYDQQLKAGDNPYLKYNHADAEFQERLKEDTSFGGNLGRAVFQAKKRLLEPLGLVEEAAKTAPGKKRPVEQSPREPDSSAGIGKSGAQPAKKRLNFGQTGDTESVPDPQPIGEPPAAPSGVGSLTMASGGGAPVADNNEGADGVGSSSGNWHCDSQWLGDRVITTSTRTWALPTYNNHLYKQISNSTSGGSSNDNAYFGYSTPWGYFDFNRFHCHFSPRDWQRLINNNWGFRPKRLNFKLFNIQVKEVTDNNGVKTIANNLTSTVQVFGDSDYQLPYVLGSAHEGCLPPFPADVFMIPQYGYLTLNDGSQAVGRSSFYCLEYFPSQMLRTGNNFQFSYEFENVPFHSSYAHSQSLDRLMNPLIDQYLYYLSKTINGSGQNQQTLKFSVAGPSNMAVQGRNYIPGPSYRQQRVSTTVTQNNNSEFAWPRASSWALNGRNSLMNPGPAMASHKEGEDRFFPLSGSLIFGKQGTGRDNVDADKVMITNEEEIKTTNPVATESYGQVATNHQSAQAQAQTGWVQNQGILPGMVWQDRDVYLQGPIWAKIPHTDGNFHPSPLMGGFGMKHPPPQILIKNTPVPADPPTAFNKDKLNSFITQYSTGQVSVEIEWELQKENSKRWNPEIQYTSNLYKSNNVEFAVNTEGVYSEPRPIGTRYLTRNL

SEQ ID NO: 1172 - protein, 736 aa, synthetic construct
MAADGYLPDWLEDNLSEGIREWWALKPGAPQPKANQQHQDNARGLVLPGYKYLGPGNGLDKGEPVNAADAAALEHDKAYDQQLKAGDNPYLKYNHADAEFQERLKEDTSFGGNLGRAVFQAKKRLLEPLGLVEEAAKTAPGKKRPVEQSPREPDSSAGIGKSGAQPAKKRLNFGQTGDTESVPDPQPIGEPPAAPSGVGSLTMASGGGAPVADNNEGADGVGSSSGNWHCDSQWLGDRVITTSTRTWALPTYNNHLYKQISNSTSGGSSNDNAYFGYSTPWGYFDFNRFHCHFSPRDWQRLINNNWGFRPKRLNFKLFNIQVKEVTDNNGVKTIANNLTSTVQVFGDSDYQLPYVLGSAHEGCLPPFPADVFMIPQYGYLTLNDGSQAVGRSSFYCLEYFPSQMLRTGNNFQFSYEFENVPFHSSYAHSQSLDRLMNPLIDQYLYYLSKTINGSGQNQQTLKFSVAGPSNMAVQGRNYIPGPSYRQQRVSTTVTQNNNSEFAWPGASSWALNGRNSLMNPGPAMASHKEGEDRFFPLSGSLIFGKQGTGRDNVDADKVMITNEEEIKTTNPVATESYGQVATNHQSAQAQAQTGWVQNQGILPGMVWQDRDVYLQGPIWAKIPHTDGNFHPSPLMGGFGMKHPPPQILIKNTPVPADPPTAFNKDKLNSFITQYSTGQVSVEIEWELQKENSKRWNPEIQYTSNLCKSNNVEFAVNTEGVYSEPRPIGTRYLTRNL

SEQ ID NO: 1173 - protein, 736 aa, synthetic construct
MAADGYLPDWLEDNLSEGIREWWALKPGAPQPKANQQHQDNARGLVLPGYKYLGPGNGLDKGEPVNAADAAALEHDKAYDQQLKAGDNPYLKYNHADAEFQERLKEDTSFGGNLGRAVFQAKKRLLEPLGLVEEAAKTAPGKKRPVEQSPREPDSSAGIGKSGAQPAKKRLNFGQTGDTESVPDPQPIGEPPAAPSGVGSLTMASGGGAPVADNNEGADGVGSSSGNWHCDSQWLGDRVITTSTRTWALPTYNNHLYKQISNSTSGGSSNDNAYFGYSTPWGYFDFNRFHCHFSPRDWQRLINNNWGFRPKRLNFKLFNIQVKEVTDNNGVKTIANNLTSTVQVFGDSDYQLPYVLGSAHEGCLPPFPADVFMIPQYGYLTLNDGSQAVGRSSFYCLEYFPSQMLRTGNNFQFSYEFENVPFHSSYAHSQSLDRLMNPLIDQYLYYLSKTINGSGQNQQTLKFSVAGPSNMAVQGRNYIPGPSYRQQRVSTTVTQNNNSEIAWPRASSWALNGRNSLMNPGPAMASHKEGEDRFFPLSGSLIFGKQGTGRDNVDADKVMITNEEEIKTTNPVATESYGQVATNHQSAQAQAQTGWVQNQGILPGMVWQDRDVYLQGPIWAKIPHTDGNFHPSPLMGGFGMKHPPPQILIKNTPVPADPPTAFNKDKLNSFITQYSTGQVSVEIEWELQKENSKRWNPEIQYTSNLYKSNNVEFAVNTEGVYSEPRPIGTRYLTRNL

SEQ ID NO: 1174 - protein, 736 aa, synthetic construct
MAADGYLPDWLEDNLSEGIREWWALKPGAPQPKANQQHQDNARGLVLPGYKYLGPGNGLDKGEPVNAADAAALEHDKAYDQQLKAGDNPYLKYNHADAEFQERLKEDTSFGGNLGRAVFQAKKRLLEPLGLVEEAAKTAPGKKRPVEQSPREPDSSAGIGKSGAQPAKKRLNFGQTGDTESVPDPQPIGEPPAAPSGVGSLTMASGGGAPVADNNEGADGVGSSSGNWHCDSQWLGDRVITTSTRTWALPTYNNHLYKQISNSTSGGSSNDNAYFGYSTPWGYFDFNRFHCHFSPRDWQRLINNNWGFRPKRLNFKLFNIQVKEVTDNNGVKTIANNLTSTVQVFGDSDYQLPYVLGSAHEGCLPPFPADVFMIPQYGYLTLNDGSQAVGRSSFYCLEYFPSQMLRTGNNFQFSYEFENVPFHSSYAHSQSLDRLMNPLIDQYLYYLSKTINGSGQNQQTLKFSVAGPSNMAVQGRNYIPGPSYRQQRVSTTVTQNNNSEIAWPGASSWALNGRNSLMNPGPAMASHKEGEDRFFPLSGSLIFGKQGTGRDNVDADKVMITNEEEIKTTNPVATESYGQVATNHQSAQAQAQTGWVQNQGILPGMVWQDRDVYLQGPIWAKIPHTDGNFHPSPLMGGFGMKHPPPQILIKNTPVPADPPTAFNKDKLNSFITQYSTGQVSVEIEWELQKENSKRWNPEIQYTSNLCKSNNVEFAVNTEGVYSEPRPIGTRYLTRNL

SEQ ID NO: 1175 - protein, 736 aa, synthetic construct
MAADGYLPDWLEDNLSEGIREWWALKPGAPQPKANQQHQDNARGLVLPGYKYLGPGNGLDKGEPVNAADAAALEHDKAYDQQLKAGDNPYLKYNHADAEFQERLKEDTSFGGNLGRAVFQAKKRLLEPLGLVEEAAKTAPGKKRPVEQSPREPDSSAGIGKSGAQPAKKRLNFGQTGDTESVPDPQPIGEPPAAPSGVGSLTMASGGGAPVADNNEGADGVGSSSGNWHCDSQWLGDRVITTSTRTWALPTYNNHLYKQISNSTSGGSSNDNAYFGYSTPWGYFDFNRFHCHFSPRDWQRLINNNWGFRPKRLNFKLFNIQVKEVTDNNGVKTIANNLTSTVQVFGDSDYQLPYVLGSAHEGCLPPFPADVFMIPQYGYLTLNDGSQAVGRSSFYCLEYFPSQMLRTGNNFQFSYEFENVPFHSSYAHSQSLDRLMNPLIDQYLYYLSKTINGSGQNQQTLKFSVAGPSNMAVQGRNYIPGPSYRQQRVSTTVTQNNNSEFAWPRASSWALNGRNSLMNPGPAMASHKEGEDRFFPLSGSLIFGKQGTGRDNVDADKVMITNEEEIKTTNPVATESYGQVATNHQSAQAQAQTGWVQNQGILPGMVWQDRDVYLQGPIWAKIPHTDGNFHPSPLMGGFGMKHPPPQILIKNTPVPADPPTAFNKDKLNSFITQYSTGQVSVEIEWELQKENSKRWNPEIQYTSNLCKSNNVEFAVNTEGVYSEPRPIGTRYLTRNL

SEQ ID NO: 1176 - protein, 736 aa, synthetic construct
MAADGYLPDWLEDNLSEGIREWWALKPGAPQPKANQQHQDNARGLVLPGYKYLGPGNGLDKGEPVNAADAAALEHDKAYDQQLKAGDNPYLKYNHADAEFQERLKEDTSFGGNLGRAVFQAKKRLLEPLGLVEEAAKTAPGKKRPVEQSPREPDSSAGIGKSGAQPAKKRLNFGQTGDTESVPDPQPIGEPPAAPSGVGSLTMASGGGAPVADNNEGADGVGSSSGNWHCDSQWLGDRVITTSTRTWALPTYNNHLYKQISNSTSGGSSNDNAYFGYSTPWGYFDFNRFHCHFSPRDWQRLINNNWGFRPKRLNFKLFNIQVKEVTDNNGVKTIANNLTSTVQVFGDSDYQLPYVLGSAHEGCLPPFPADVFMIPQYGYLTLNDGSQAVGRSSFYCLEYFPSQMLRTGNNFQFSYEFENVPFHSSYAHSQSLDRLMNPLIDQYLYYLSKTINGSGQNQQTLKFSVAGPSNMAVQGRNYIPGPSYRQQRVSTTVTQNNNSEIAWPRASSWALNGRNSLMNPGPAMASHKEGEDRFFPLSGSLIFGKQGTGRDNVDADKVMITNEEEIKTTNPVATESYGQVATNHQSAQAQAQTGWVQNQGILPGMVWQDRDVYLQGPIWAKIPHTDGNFHPSPLMGGFGMKHPPPQILIKNTPVPADPPTAFNKDKLNSFITQYSTGQVSVEIEWELQKENSKRWNPEIQYTSNLCKSNNVEFAVNTEGVYSEPRPIGTRYLTRNL

SEQ ID NO: 1177 - protein, 736 aa, synthetic construct
MAADGYLPDWLEDNLSEGIREWWALKPGAPQPKANQQHQDNARGLVLPGYKYLGPGNGLDKGEPVNAADAAALEHDKAYDQQLKAGDNPYLKYNHADAEFQERLKEDTSFGGNLGRAVFQAKKRLLEPLGLVEEAAKTAPGKKRPVEQSPREPDSSAGIGKSGAQPAKKRLNFGQTGDTESVPDPQPIGEPPAAPSGVGSLTMASGGGAPVADNNEGADGVGSSSGNWHCDSQWLGDRVITTSTRTWALPTYNNHLYKQISNSTSGGSSNDNAYFGYSTPWGYFDFNRFHCHFSPRDWQRLINNNWGFRPKRLNFKLFNIQVKEVTDNNGVKTIANNLTSTVQVFADSDYQLPYVLGSAHEGCLPPFPADVFMIPQYGYLTLNDGSQAVGRSSFYCLEYFPSQMLRTGNNFQFSYEFENVPFHSSYAHSQSLDRLMNPLIDQYLYYLSKTINGSGQNQQTLKFSVAGPSNMAVQGRNYIPGPSYRQQRVSTTVTQNNNSEFAWPGASSWALNGRNSLMNPGPAMASHKEGEDRFFPLSGSLIFGKQGTGRDNVDADKVMITNEEEIKTTNPVATESYGQVATNHQSAQAQAQTGWVQNQGILPGMVWQDRDVYLQGPIWAKIPHTDGNFHPSPLMGGFGMKHPPPQILIKNTPVPADPPTAFNKDKLNSFITQYSTGQVSVEIEWELQKENSKRWNPEIQYTSNLYKSNNVEFAVNTEGVYSEPRPIGTRYLTRNL

SEQ ID NO: 1178 - protein, 736 aa, synthetic construct
MAADGYLPDWLEDNLSEGIREWWALKPGAPQPKANQQHQDNARGLVLPGYKYLGPGNGLDKGEPVNAADAAALEHDKAYDQQLKAGDNPYLKYNHADAEFQERLKEDTSFGGNLGRAVFQAKKRLLEPLGLVEEAAKTAPGKKRPVEQSPREPDSSAGIGKSGAQPAKKRLNFGQTGDTESVPDPQPIGEPPAAPSGVGSLTMASGGGAPVADNNEGADGVGSSSGNWHCDSQWLGDRVITTSTRTWALPTYNNHLYKQISNSTSGGSSNDNAYFGYSTPWGYFDFNRFHCHFSPRDWQRLINNNWGFRPKRLNFKLFNIQVKEVTDNNGVKTIANNLTSTVQVFADSDYQLPYVLGSAHEGCLPPFPADVFMIPQYGYLTLNDGSQAVGRSSFYCLEYFPSQMLRTGNNFQFSYEFENVPFHSSYAHSQSLDRLMNPLIDQYLYYLSKTINGSGQNQQTLKFSVAGPSNMAVQGRNYIPGPSYRQQRVSTTVTQNNNSEIAWPGASSWALNGRNSLMNPGPAMASHKEGEDRFFPLSGSLIFGKQGTGRDNVDADKVMITNEEEIKTTNPVATESYGQVATNHQSAQAQAQTGWVQNQGILPGMVWQDRDVYLQGPIWAKIPHTDGNFHPSPLMGGFGMKHPPPQILIKNTPVPADPPTAFNKDKLNSFITQYSTGQVSVEIEWELQKENSKRWNPEIQYTSNLYKSNNVEFAVNTEGVYSEPRPIGTRYLTRNL

SEQ ID NO: 1179 - protein, 736 aa, synthetic construct
MAADGYLPDWLEDNLSEGIREWWALKPGAPQPKANQQHQDNARGLVLPGYKYLGPGNGLDKGEPVNAADAAALEHDKAYDQQLKAGDNPYLKYNHADAEFQERLKEDTSFGGNLGRAVFQAKKRLLEPLGLVEEAAKTAPGKKRPVEQSPREPDSSAGIGKSGAQPAKKRLNFGQTGDTESVPDPQPIGEPPAAPSGVGSLTMASGGGAPVADNNEGADGVGSSSGNWHCDSQWLGDRVITTSTRTWALPTYNNHLYKQISNSTSGGSSNDNAYFGYSTPWGYFDFNRFHCHFSPRDWQRLINNNWGFRPKRLNFKLFNIQVKEVTDNNGVKTIANNLTSTVQVFADSDYQLPYVLGSAHEGCLPPFPADVFMIPQYGYLTLNDGSQAVGRSSFYCLEYFPSQMLRTGNNFQFSYEFENVPFHSSYAHSQSLDRLMNPLIDQYLYYLSKTINGSGQNQQTLKFSVAGPSNMAVQGRNYIPGPSYRQQRVSTTVTQNNNSEFAWPRASSWALNGRNSLMNPGPAMASHKEGEDRFFPLSGSLIFGKQGTGRDNVDADKVMITNEEEIKTTNPVATESYGQVATNHQSAQAQAQTGWVQNQGILPGMVWQDRDVYLQGPIWAKIPHTDGNFHPSPLMGGFGMKHPPPQILIKNTPVPADPPTAFNKDKLNSFITQYSTGQVSVEIEWELQKENSKRWNPEIQYTSNLYKSNNVEFAVNTEGVYSEPRPIGTRYLTRNL

SEQ ID NO: 1180 - protein, 736 aa, synthetic construct
MAADGYLPDWLEDNLSEGIREWWALKPGAPQPKANQQHQDNARGLVLPGYKYLGPGNGLDKGEPVNAADAAALEHDKAYDQQLKAGDNPYLKYNHADAEFQERLKEDTSFGGNLGRAVFQAKKRLLEPLGLVEEAAKTAPGKKRPVEQSPREPDSSAGIGKSGAQPAKKRLNFGQTGDTESVPDPQPIGEPPAAPSGVGSLTMASGGGAPVADNNEGADGVGSSSGNWHCDSQWLGDRVITTSTRTWALPTYNNHLYKQISNSTSGGSSNDNAYFGYSTPWGYFDFNRFHCHFSPRDWQRLINNNWGFRPKRLNFKLFNIQVKEVTDNNGVKTIANNLTSTVQVFADSDYQLPYVLGSAHEGCLPPFPADVFMIPQYGYLTLNDGSQAVGRSSFYCLEYFPSQMLRTGNNFQFSYEFENVPFHSSYAHSQSLDRLMNPLIDQYLYYLSKTINGSGQNQQTLKFSVAGPSNMAVQGRNYIPGPSYRQQRVSTTVTQNNNSEFAWPGASSWALNGRNSLMNPGPAMASHKEGEDRFFPLSGSLIFGKQGTGRDNVDADKVMITNEEEIKTTNPVATESYGQVATNHQSAQAQAQTGWVQNQGILPGMVWQDRDVYLQGPIWAKIPHTDGNFHPSPLMGGFGMKHPPPQILIKNTPVPADPPTAFNKDKLNSFITQYSTGQVSVEIEWELQKENSKRWNPEIQYTSNLCKSNNVEFAVNTEGVYSEPRPIGTRYLTRNL

SEQ ID NO: 1181 - protein, 736 aa, synthetic construct
MAADGYLPDWLEDNLSEGIREWWALKPGAPQPKANQQHQDNARGLVLPGYKYLGPGNGLDKGEPVNAADAAALEHDKAYDQQLKAGDNPYLKYNHADAEFQERLKEDTSFGGNLGRAVFQAKKRLLEPLGLVEEAAKTAPGKKRPVEQSPREPDSSAGIGKSGAQPAKKRLNFGQTGDTESVPDPQPIGEPPAAPSGVGSLTMASGGGAPVADNNEGADGVGSSSGNWHCDSQWLGDRVITTSTRTWALPTYNNHLYKQISNSTSGGSSNDNAYFGYSTPWGYFDFNRFHCHFSPRDWQRLINNNWGFRPKRLNFKLFNIQVKEVTDNNGVKTIANNLTSTVQVFADSDYQLPYVLGSAHEGCLPPFPADVFMIPQYGYLTLNDGSQAVGRSSFYCLEYFPSQMLRTGNNFQFSYEFENVPFHSSYAHSQSLDRLMNPLIDQYLYYLSKTINGSGQNQQTLKFSVAGPSNMAVQGRNYIPGPSYRQQRVSTTVTQNNNSEIAWPRASSWALNGRNSLMNPGPAMASHKEGEDRFFPLSGSLIFGKQGTGRDNVDADKVMITNEEEIKTTNPVATESYGQVATNHQSAQAQAQTGWVQNQGILPGMVWQDRDVYLQGPIWAKIPHTDGNFHPSPLMGGFGMKHPPPQILIKNTPVPADPPTAFNKDKLNSFITQYSTGQVSVEIEWELQKENSKRWNPEIQYTSNLYKSNNVEFAVNTEGVYSEPRPIGTRYLTRNL

SEQ ID NO: 1182 - protein, 736 aa, synthetic construct
MAADGYLPDWLEDNLSEGIREWWALKPGAPQPKANQQHQDNARGLVLPGYKYLGPGNGLDKGEPVNAADAAALEHDKAYDQQLKAGDNPYLKYNHADAEFQERLKEDTSFGGNLGRAVFQAKKRLLEPLGLVEEAAKTAPGKKRPVEQSPREPDSSAGIGKSGAQPAKKRLNFGQTGDTESVPDPQPIGEPPAAPSGVGSLTMASGGGAPVADNNEGADGVGSSSGNWHCDSQWLGDRVITTSTRTWALPTYNNHLYKQISNSTSGGSSNDNAYFGYSTPWGYFDFNRFHCHFSPRDWQRLINNNWGFRPKRLNFKLFNIQVKEVTDNNGVKTIANNLTSTVQVFADSDYQLPYVLGSAHEGCLPPFPADVFMIPQYGYLTLNDGSQAVGRSSFYCLEYFPSQMLRTGNNFQFSYEFENVPFHSSYAHSQSLDRLMNPLIDQYLYYLSKTINGSGQNQQTLKFSVAGPSNMAVQGRNYIPGPSYRQQRVSTTVTQNNNSEIAWPGASSWALNGRNSLMNPGPAMASHKEGEDRFFPLSGSLIFGKQGTGRDNVDADKVMITNEEEIKTTNPVATESYGQVATNHQSAQAQAQTGWVQNQGILPGMVWQDRDVYLQGPIWAKIPHTDGNFHPSPLMGGFGMKHPPPQILIKNTPVPADPPTAFNKDKLNSFITQYSTGQVSVEIEWELQKENSKRWNPEIQYTSNLCKSNNVEFAVNTEGVYSEPRPIGTRYLTRNL

SEQ ID NO: 1183 - protein, 736 aa, synthetic construct
MAADGYLPDWLEDNLSEGIREWWALKPGAPQPKANQQHQDNARGLVLPGYKYLGPGNGLDKGEPVNAADAAALEHDKAYDQQLKAGDNPYLKYNHADAEFQERLKEDTSFGGNLGRAVFQAKKRLLEPLGLVEEAAKTAPGKKRPVEQSPREPDSSAGIGKSGAQPAKKRLNFGQTGDTESVPDPQPIGEPPAAPSGVGSLTMASGGGAPVADNNEGADGVGSSSGNWHCDSQWLGDRVITTSTRTWALPTYNNHLYKQISNSTSGGSSNDNAYFGYSTPWGYFDFNRFHCHFSPRDWQRLINNNWGFRPKRLNFKLFNIQVKEVTDNNGVKTIANNLTSTVQVFADSDYQLPYVLGSAHEGCLPPFPADVFMIPQYGYLTLNDGSQAVGRSSFYCLEYFPSQMLRTGNNFQFSYEFENVPFHSSYAHSQSLDRLMNPLIDQYLYYLSKTINGSGQNQQTLKFSVAGPSNMAVQGRNYIPGPSYRQQRVSTTVTQNNNSEFAWPRASSWALNGRNSLMNPGPAMASHKEGEDRFFPLSGSLIFGKQGTGRDNVDADKVMITNEEEIKTTNPVATESYGQVATNHQSAQAQAQTGWVQNQGILPGMVWQDRDVYLQGPIWAKIPHTDGNFHPSPLMGGFGMKHPPPQILIKNTPVPADPPTAFNKDKLNSFITQYSTGQVSVEIEWELQKENSKRWNPEIQYTSNLCKSNNVEFAVNTEGVYSEPRPIGTRYLTRNL

SEQ ID NO: 1184 - protein, 736 aa, synthetic construct
MAADGYLPDWLEDNLSEGIREWWALKPGAPQPKANQQHQDNARGLVLPGYKYLGPGNGLDKGEPVNAADAAALEHDKAYDQQLKAGDNPYLKYNHADAEFQERLKEDTSFGGNLGRAVFQAKKRLLEPLGLVEEAAKTAPGKKRPVEQSPREPDSSAGIGKSGAQPAKKRLNFGQTGDTESVPDPQPIGEPPAAPSGVGSLTMASGGGAPVADNNEGADGVGSSSGNWHCDSQWLGDRVITTSTRTWALPTYNNHLYKQISNSTSGGSSNDNAYFGYSTPWGYFDFNRFHCHFSPRDWQRLINNNWGFRPKRLNFKLFNIQVKEVTDNNGVKTIANNLTSTVQVFADSDYQLPYVLGSAHEGCLPPFPADVFMIPQYGYLTLNDGSQAVGRSSFYCLEYFPSQMLRTGNNFQFSYEFENVPFHSSYAHSQSLDRLMNPLIDQYLYYLSKTINGSGQNQQTLKFSVAGPSNMAVQGRNYIPGPSYRQQRVSTTVTQNNNSEIAWPRASSWALNGRNSLMNPGPAMASHKEGEDRFFPLSGSLIFGKQGTGRDNVDADKVMITNEEEIKTTNPVATESYGQVATNHQSAQAQAQTGWVQNQGILPGMVWQDRDVYLQGPIWAKIPHTDGNFHPSPLMGGFGMKHPPPQILIKNTPVPADPPTAFNKDKLNSFITQYSTGQVSVEIEWELQKENSKRWNPEIQYTSNLCKSNNVEFAVNTEGVYSEPRPIGTRYLTRNL

SEQ ID NO: 1185 - protein, 736 aa, synthetic construct
MAADGYLPDWLEDNLSEGIREWWALKPGAPQPKANQQHQDNARGLVLPGYKYLGPGNGLDKGEPVNAADAAALEHDKAYDQQLKAGDNPYLKYNHADAEFQERLKEDTSFGGNLGRAVFQAKKRLLEPLGLVEEAAKTAPGKKRPVEQSPQEPDSSAGIGKSGAQPAKKRLNFGQTGDTESVPDPQPIGEPPAAPSGVGSLTMASCGGAPVADNNEGADGVGSSSGNWHCDSQWLGDRVITTSTRTWALPTYNNHLYKQISNSTSGGSSNDNAYFGYSTPWGYFDFNRFHCHFSPRDWQRLINNNWGFRPKRLNFKLFNIQVKEVTDNNGVKTIANNLTSTVQVFGDSDYQLPYVLGSAHEGCLPPFPADVFMIPQYGYLTLNDGSQAVGRSSFYCLEYFPSQMLRTGNNFQFSYEFENVPFHSSYAHSQSLDRLMNPLIDQYLYYLSKTINGSGQNQQTLKFSVAGPSNMAVQGRNYIPGPSYRQQRVSTTVTQNNNSEFAWPGASSWALNGRNSLMNPGPAMASHKEGEDRFFPLSGSLIFGKQGTGRDNVDADKVMITNEEEIKTTNPVATESYGQVATNHQSAQAQAQTGWVQNQGILPGMVWQDRDVYLQGPIWAKIPHTDGNFHPSPLMGGFGMKHPPPQILIKNTPVPADPPTAFNKDKLNSFITQYSTGQVSVEIEWELQKENSKRWNPEIQYTSNYYKSNNVEFAVNTEGVYSEPRPIGTRYLTRNL

SEQ ID NO: 1186 - protein, 736 aa, synthetic construct
MAADGYLPDWLEDNLSEGIREWWALKPGAPQPKANQQHQDNARGLVLPGYKYLGPGNGLDKGEPVNAADAAALEHDKAYDQQLKAGDNPYLKYNHADAEFQERLKEDTSFGGNLGRAVFQAKKRLLEPLGLVEEAAKTAPGKKRPVEQSPQEPDSSAGIGKSGAQPAKKRLNFGQTGDTESVPDPQPIGEPPAAPSGVGSLTMASCGGAPVADNNEGADGVGSSSGNWHCDSQWLGDRVITTSTRTWALPTYNNHLYKQISNSTSGGSSNDNAYFGYSTPWGYFDFNRFHCHFSPRDWQRLINNNWGFRPKRLNFKLFNIQVKEVTDNNGVKTIANNLTSTVQVFGDSDYQLPYVLGSAHEGCLPPFPADVFMIPQYGYLTLNDGSQAVGRSSFYCLEYFPSQMLRTGNNFQFSYEFENVPFHSSYAHSQSLDRLMNPLIDQYLYYLSKTINGSGQNQQTLKFSVAGPSNMAVQGRNYIPGPSYRQQRVSTTVTQNNNSEIAWPGASSWALNGRNSLMNPGPAMASHKEGEDRFFPLSGSLIFGKQGTGRDNVDADKVMITNEEEIKTTNPVATESYGQVATNHQSAQAQAQTGWVQNQGILPGMVWQDRDVYLQGPIWAKIPHTDGNFHPSPLMGGFGMKHPPPQILIKNTPVPADPPTAFNKDKLNSFITQYSTGQVSVEIEWELQKENSKRWNPEIQYTSNYYKSNNVEFAVNTEGVYSEPRPIGTRYLTRNL

SEQ ID NO: 1187 - protein, 736 aa, synthetic construct
MAADGYLPDWLEDNLSEGIREWWALKPGAPQPKANQQHQDNARGLVLPGYKYLGPGNGLDKGEPVNAADAAALEHDKAYDQQLKAGDNPYLKYNHADAEFQERLKEDTSFGGNLGRAVFQAKKRLLEPLGLVEEAAKTAPGKKRPVEQSPQEPDSSAGIGKSGAQPAKKRLNFGQTGDTESVPDPQPIGEPPAAPSGVGSLTMASCGGAPVADNNEGADGVGSSSGNWHCDSQWLGDRVITTSTRTWALPTYNNHLYKQISNSTSGGSSNDNAYFGYSTPWGYFDFNRFHCHFSPRDWQRLINNNWGFRPKRLNFKLFNIQVKEVTDNNGVKTIANNLTSTVQVFGDSDYQLPYVLGSAHEGCLPPFPADVFMIPQYGYLTLNDGSQAVGRSSFYCLEYFPSQMLRTGNNFQFSYEFENVPFHSSYAHSQSLDRLMNPLIDQYLYYLSKTINGSGQNQQTLKFSVAGPSNMAVQGRNYIPGPSYRQQRVSTTVTQNNNSEFAWPRASSWALNGRNSLMNPGPAMASHKEGEDRFFPLSGSLIFGKQGTGRDNVDADKVMITNEEEIKTTNPVATESYGQVATNHQSAQAQAQTGWVQNQGILPGMVWQDRDVYLQGPIWAKIPHTDGNFHPSPLMGGFGMKHPPPQILIKNTPVPADPPTAFNKDKLNSFITQYSTGQVSVEIEWELQKENSKRWNPEIQYTSNYYKSNNVEFAVNTEGVYSEPRPIGTRYLTRNL

SEQ ID NO: 1188 - protein, 736 aa, synthetic construct
MAADGYLPDWLEDNLSEGIREWWALKPGAPQPKANQQHQDNARGLVLPGYKYLGPGNGLDKGEPVNAADAAALEHDKAYDQQLKAGDNPYLKYNHADAEFQERLKEDTSFGGNLGRAVFQAKKRLLEPLGLVEEAAKTAPGKKRPVEQSPQEPDSSAGIGKSGAQPAKKRLNFGQTGDTESVPDPQPIGEPPAAPSGVGSLTMASCGGAPVADNNEGADGVGSSSGNWHCDSQWLGDRVITTSTRTWALPTYNNHLYKQISNSTSGGSSNDNAYFGYSTPWGYFDFNRFHCHFSPRDWQRLINNNWGFRPKRLNFKLFNIQVKEVTDNNGVKTIANNLTSTVQVFGDSDYQLPYVLGSAHEGCLPPFPADVFMIPQYGYLTLNDGSQAVGRSSFYCLEYFPSQMLRTGNNFQFSYEFENVPFHSSYAHSQSLDRLMNPLIDQYLYYLSKTINGSGQNQQTLKFSVAGPSNMAVQGRNYIPGPSYRQQRVSTTVTQNNNSEFAWPGASSWALNGRNSLMNPGPAMASHKEGEDRFFPLSGSLIFGKQGTGRDNVDADKVMITNEEEIKTTNPVATESYGQVATNHQSAQAQAQTGWVQNQGILPGMVWQDRDVYLQGPIWAKIPHTDGNFHPSPLMGGFGMKHPPPQILIKNTPVPADPPTAFNKDKLNSFITQYSTGQVSVEIEWELQKENSKRWNPEIQYTSNYCKSNNVEFAVNTEGVYSEPRPIGTRYLTRNL

SEQ ID NO: 1189 - protein, 736 aa, synthetic construct
MAADGYLPDWLEDNLSEGIREWWALKPGAPQPKANQQHQDNARGLVLPGYKYLGPGNGLDKGEPVNAADAAALEHDKAYDQQLKAGDNPYLKYNHADAEFQERLKEDTSFGGNLGRAVFQAKKRLLEPLGLVEEAAKTAPGKKRPVEQSPQEPDSSAGIGKSGAQPAKKRLNFGQTGDTESVPDPQPIGEPPAAPSGVGSLTMASCGGAPVADNNEGADGVGSSSGNWHCDSQWLGDRVITTSTRTWALPTYNNHLYKQISNSTSGGSSNDNAYFGYSTPWGYFDFNRFHCHFSPRDWQRLINNNWGFRPKRLNFKLFNIQVKEVTDNNGVKTIANNLTSTVQVFGDSDYQLPYVLGSAHEGCLPPFPADVFMIPQYGYLTLNDGSQAVGRSSFYCLEYFPSQMLRTGNNFQFSYEFENVPFHSSYAHSQSLDRLMNPLIDQYLYYLSKTINGSGQNQQTLKFSVAGPSNMAVQGRNYIPGPSYRQQRVSTTVTQNNNSEIAWPRASSWALNGRNSLMNPGPAMASHKEGEDRFFPLSGSLIFGKQGTGRDNVDADKVMITNEEEIKTTNPVATESYGQVATNHQSAQAQAQTGWVQNQGILPGMVWQDRDVYLQGPIWAKIPHTDGNFHPSPLMGGFGMKHPPPQILIKNTPVPADPPTAFNKDKLNSFITQYSTGQVSVEIEWELQKENSKRWNPEIQYTSNYYKSNNVEFAVNTEGVYSEPRPIGTRYLTRNL

SEQ ID NO: 1190 - protein, 736 aa, synthetic construct
MAADGYLPDWLEDNLSEGIREWWALKPGAPQPKANQQHQDNARGLVLPGYKYLGPGNGLDKGEPVNAADAAALEHDKAYDQQLKAGDNPYLKYNHADAEFQERLKEDTSFGGNLGRAVFQAKKRLLEPLGLVEEAAKTAPGKKRPVEQSPQEPDSSAGIGKSGAQPAKKRLNFGQTGDTESVPDPQPIGEPPAAPSGVGSLTMASCGGAPVADNNEGADGVGSSSGNWHCDSQWLGDRVITTSTRTWALPTYNNHLYKQISNSTSGGSSNDNAYFGYSTPWGYFDFNRFHCHFSPRDWQRLINNNWGFRPKRLNFKLFNIQVKEVTDNNGVKTIANNLTSTVQVFGDSDYQLPYVLGSAHEGCLPPFPADVFMIPQYGYLTLNDGSQAVGRSSFYCLEYFPSQMLRTGNNFQFSYEFENVPFHSSYAHSQSLDRLMNPLIDQYLYYLSKTINGSGQNQQTLKFSVAGPSNMAVQGRNYIPGPSYRQQRVSTTVTQNNNSEIAWPGASSWALNGRNSLMNPGPAMASHKEGEDRFFPLSGSLIFGKQGTGRDNVDADKVMITNEEEIKTTNPVATESYGQVATNHQSAQAQAQTGWVQNQGILPGMVWQDRDVYLQGPIWAKIPHTDGNFHPSPLMGGFGMKHPPPQILIKNTPVPADPPTAFNKDKLNSFITQYSTGQVSVEIEWELQKENSKRWNPEIQYTSNYCKSNNVEFAVNTEGVYSEPRPIGTRYLTRNL

SEQ ID NO: 1191 - protein, 736 aa, synthetic construct
MAADGYLPDWLEDNLSEGIREWWALKPGAPQPKANQQHQDNARGLVLPGYKYLGPGNGLDKGEPVNAADAAALEHDKAYDQQLKAGDNPYLKYNHADAEFQERLKEDTSFGGNLGRAVFQAKKRLLEPLGLVEEAAKTAPGKKRPVEQSPQEPDSSAGIGKSGAQPAKKRLNFGQTGDTESVPDPQPIGEPPAAPSGVGSLTMASCGGAPVADNNEGADGVGSSSGNWHCDSQWLGDRVITTSTRTWALPTYNNHLYKQISNSTSGGSSNDNAYFGYSTPWGYFDFNRFHCHFSPRDWQRLINNNWGFRPKRLNFKLFNIQVKEVTDNNGVKTIANNLTSTVQVFGDSDYQLPYVLGSAHEGCLPPFPADVFMIPQYGYLTLNDGSQAVGRSSFYCLEYFPSQMLRTGNNFQFSYEFENVPFHSSYAHSQSLDRLMNPLIDQYLYYLSKTINGSGQNQQTLKFSVAGPSNMAVQGRNYIPGPSYRQQRVSTTVTQNNNSEFAWPRASSWALNGRNSLMNPGPAMASHKEGEDRFFPLSGSLIFGKQGTGRDNVDADKVMITNEEEIKTTNPVATESYGQVATNHQSAQAQAQTGWVQNQGILPGMVWQDRDVYLQGPIWAKIPHTDGNFHPSPLMGGFGMKHPPPQILIKNTPVPADPPTAFNKDKLNSFITQYSTGQVSVEIEWELQKENSKRWNPEIQYTSNYCKSNNVEFAVNTEGVYSEPRPIGTRYLTRNL

SEQ ID NO: 1192 - protein, 736 aa, synthetic construct
MAADGYLPDWLEDNLSEGIREWWALKPGAPQPKANQQHQDNARGLVLPGYKYLGPGNGLDKGEPVNAADAAALEHDKAYDQQLKAGDNPYLKYNHADAEFQERLKEDTSFGGNLGRAVFQAKKRLLEPLGLVEEAAKTAPGKKRPVEQSPQEPDSSAGIGKSGAQPAKKRLNFGQTGDTESVPDPQPIGEPPAAPSGVGSLTMASCGGAPVADNNEGADGVGSSSGNWHCDSQWLGDRVITTSTRTWALPTYNNHLYKQISNSTSGGSSNDNAYFGYSTPWGYFDFNRFHCHFSPRDWQRLINNNWGFRPKRLNFKLFNIQVKEVTDNNGVKTIANNLTSTVQVFGDSDYQLPYVLGSAHEGCLPPFPADVFMIPQYGYLTLNDGSQAVGRSSFYCLEYFPSQMLRTGNNFQFSYEFENVPFHSSYAHSQSLDRLMNPLIDQYLYYLSKTINGSGQNQQTLKFSVAGPSNMAVQGRNYIPGPSYRQQRVSTTVTQNNNSEIAWPRASSWALNGRNSLMNPGPAMASHKEGEDRFFPLSGSLIFGKQGTGRDNVDADKVMITNEEEIKTTNPVATESYGQVATNHQSAQAQAQTGWVQNQGILPGMVWQDRDVYLQGPIWAKIPHTDGNFHPSPLMGGFGMKHPPPQILIKNTPVPADPPTAFNKDKLNSFITQYSTGQVSVEIEWELQKENSKRWNPEIQYTSNYCKSNNVEFAVNTEGVYSEPRPIGTRYLTRNL

SEQ ID NO: 1193 - protein, 736 aa, synthetic construct
MAADGYLPDWLEDNLSEGIREWWALKPGAPQPKANQQHQDNARGLVLPGYKYLGPGNGLDKGEPVNAADAAALEHDKAYDQQLKAGDNPYLKYNHADAEFQERLKEDTSFGGNLGRAVFQAKKRLLEPLGLVEEAAKTAPGKKRPVEQSPQEPDSSAGIGKSGAQPAKKRLNFGQTGDTESVPDPQPIGEPPAAPSGVGSLTMASCGGAPVADNNEGADGVGSSSGNWHCDSQWLGDRVITTSTRTWALPTYNNHLYKQISNSTSGGSSNDNAYFGYSTPWGYFDFNRFHCHFSPRDWQRLINNNWGFRPKRLNFKLFNIQVKEVTDNNGVKTIANNLTSTVQVFTDSDYQLPYVLGSAHEGCLPPFPADVFMIPQYGYLTLNDGSQAVGRSSFYCLEYFPSQMLRTGNNFQFSYEFENVPFHSSYAHSQSLDRLMNPLIDQYLYYLSKTINGSGQNQQTLKFSVAGPSNMAVQGRNYIPGPSYRQQRVSTTVTQNNNSEFAWPGASSWALNGRNSLMNPGPAMASHKEGEDRFFPLSGSLIFGKQGTGRDNVDADKVMITNEEEIKTTNPVATESYGQVATNHQSAQAQAQTGWVQNQGILPGMVWQDRDVYLQGPIWAKIPHTDGNFHPSPLMGGFGMKHPPPQILIKNTPVPADPPTAFNKDKLNSFITQYSTGQVSVEIEWELQKENSKRWNPEIQYTSNLYKSNNVEFAVNTEGVYSEPRPIGTRYLTRNL

SEQ ID NO: 1194 - protein, 736 aa, synthetic construct
MAADGYLPDWLEDNLSEGIREWWALKPGAPQPKANQQHQDNARGLVLPGYKYLGPGNGLDKGEPVNAADAAALEHDKAYDQQLKAGDNPYLKYNHADAEFQERLKEDTSFGGNLGRAVFQAKKRLLEPLGLVEEAAKTAPGKKRPVEQSPQEPDSSAGIGKSGAQPAKKRLNFGQTGDTESVPDPQPIGEPPAAPSGVGSLTMASCGGAPVADNNEGADGVGSSSGNWHCDSQWLGDRVITTSTRTWALPTYNNHLYKQISNSTSGGSSNDNAYFGYSTPWGYFDFNRFHCHFSPRDWQRLINNNWGFRPKRLNFKLFNIQVKEVTDNNGVKTIANNLTSTVQVFTDSDYQLPYVLGSAHEGCLPPFPADVFMIPQYGYLTLNDGSQAVGRSSFYCLEYFPSQMLRTGNNFQFSYEFENVPFHSSYAHSQSLDRLMNPLIDQYLYYLSKTINGSGQNQQTLKFSVAGPSNMAVQGRNYIPGPSYRQQRVSTTVTQNNNSEIAWPGASSWALNGRNSLMNPGPAMASHKEGEDRFFPLSGSLIFGKQGTGRDNVDADKVMITNEEEIKTTNPVATESYGQVATNHQSAQAQAQTGWVQNQGILPGMVWQDRDVYLQGPIWAKIPHTDGNFHPSPLMGGFGMKHPPPQILIKNTPVPADPPTAFNKDKLNSFITQYSTGQVSVEIEWELQKENSKRWNPEIQYTSNLYKSNNVEFAVNTEGVYSEPRPIGTRYLTRNL

SEQ ID NO: 1195 - protein, 736 aa, synthetic construct
MAADGYLPDWLEDNLSEGIREWWALKPGAPQPKANQQHQDNARGLVLPGYKYLGPGNGLDKGEPVNAADAAALEHDKAYDQQLKAGDNPYLKYNHADAEFQERLKEDTSFGGNLGRAVFQAKKRLLEPLGLVEEAAKTAPGKKRPVEQSPQEPDSSAGIGKSGAQPAKKRLNFGQTGDTESVPDPQPIGEPPAAPSGVGSLTMASCGGAPVADNNEGADGVGSSSGNWHCDSQWLGDRVITTSTRTWALPTYNNHLYKQISNSTSGGSSNDNAYFGYSTPWGYFDFNRFHCHFSPRDWQRLINNNWGFRPKRLNFKLFNIQVKEVTDNNGVKTIANNLTSTVQVFTDSDYQLPYVLGSAHEGCLPPFPADVFMIPQYGYLTLNDGSQAVGRSSFYCLEYFPSQMLRTGNNFQFSYEFENVPFHSSYAHSQSLDRLMNPLIDQYLYYLSKTINGSGQNQQTLKFSVAGPSNMAVQGRNYIPGPSYRQQRVSTTVTQNNNSEFAWPRASSWALNGRNSLMNPGPAMASHKEGEDRFFPLSGSLIFGKQGTGRDNVDADKVMITNEEEIKTTNPVATESYGQVATNHQSAQAQAQTGWVQNQGILPGMVWQDRDVYLQGPIWAKIPHTDGNFHPSPLMGGFGMKHPPPQILIKNTPVPADPPTAFNKDKLNSFITQYSTGQVSVEIEWELQKENSKRWNPEIQYTSNLYKSNNVEFAVNTEGVYSEPRPIGTRYLTRNL

SEQ ID NO: 1196 - protein, 736 aa, synthetic construct
MAADGYLPDWLEDNLSEGIREWWALKPGAPQPKANQQHQDNARGLVLPGYKYLGPGNGLDKGEPVNAADAAALEHDKAYDQQLKAGDNPYLKYNHADAEFQERLKEDTSFGGNLGRAVFQAKKRLLEPLGLVEEAAKTAPGKKRPVEQSPQEPDSSAGIGKSGAQPAKKRLNFGQTGDTESVPDPQPIGEPPAAPSGVGSLTMASCGGAPVADNNEGADGVGSSSGNWHCDSQWLGDRVITTSTRTWALPTYNNHLYKQISNSTSGGSSNDNAYFGYSTPWGYFDFNRFHCHFSPRDWQRLINNNWGFRPKRLNFKLFNIQVKEVTDNNGVKTIANNLTSTVQVFTDSDYQLPYVLGSAHEGCLPPFPADVFMIPQYGYLTLNDGSQAVGRSSFYCLEYFPSQMLRTGNNFQFSYEFENVPFHSSYAHSQSLDRLMNPLIDQYLYYLSKTINGSGQNQQTLKFSVAGPSNMAVQGRNYIPGPSYRQQRVSTTVTQNNNSEFAWPGASSWALNGRNSLMNPGPAMASHKEGEDRFFPLSGSLIFGKQGTGRDNVDADKVMITNEEEIKTTNPVATESYGQVATNHQSAQAQAQTGWVQNQGILPGMVWQDRDVYLQGPIWAKIPHTDGNFHPSPLMGGFGMKHPPPQILIKNTPVPADPPTAFNKDKLNSFITQYSTGQVSVEIEWELQKENSKRWNPEIQYTSNLCKSNNVEFAVNTEGVYSEPRPIGTRYLTRNL

SEQ ID NO: 1197 - protein, 736 aa, synthetic construct
MAADGYLPDWLEDNLSEGIREWWALKPGAPQPKANQQHQDNARGLVLPGYKYLGPGNGLDKGEPVNAADAAALEHDKAYDQQLKAGDNPYLKYNHADAEFQERLKEDTSFGGNLGRAVFQAKKRLLEPLGLVEEAAKTAPGKKRPVEQSPQEPDSSAGIGKSGAQPAKKRLNFGQTGDTESVPDPQPIGEPPAAPSGVGSLTMASCGGAPVADNNEGADGVGSSSGNWHCDSQWLGDRVITTSTRTWALPTYNNHLYKQISNSTSGGSSNDNAYFGYSTPWGYFDFNRFHCHFSPRDWQRLINNNWGFRPKRLNFKLFNIQVKEVTDNNGVKTIANNLTSTVQVFTDSDYQLPYVLGSAHEGCLPPFPADVFMIPQYGYLTLNDGSQAVGRSSFYCLEYFPSQMLRTGNNFQFSYEFENVPFHSSYAHSQSLDRLMNPLIDQYLYYLSKTINGSGQNQQTLKFSVAGPSNMAVQGRNYIPGPSYRQQRVSTTVTQNNNSEIAWPRASSWALNGRNSLMNPGPAMASHKEGEDRFFPLSGSLIFGKQGTGRDNVDADKVMITNEEEIKTTNPVATESYGQVATNHQSAQAQAQTGWVQNQGILPGMVWQDRDVYLQGPIWAKIPHTDGNFHPSPLMGGFGMKHPPPQILIKNTPVPADPPTAFNKDKLNSFITQYSTGQVSVEIEWELQKENSKRWNPEIQYTSNLYKSNNVEFAVNTEGVYSEPRPIGTRYLTRNL

SEQ ID NO: 1198 - protein, 736 aa, synthetic construct
MAADGYLPDWLEDNLSEGIREWWALKPGAPQPKANQQHQDNARGLVLPGYKYLGPGNGLDKGEPVNAADAAALEHDKAYDQQLKAGDNPYLKYNHADAEFQERLKEDTSFGGNLGRAVFQAKKRLLEPLGLVEEAAKTAPGKKRPVEQSPQEPDSSAGIGKSGAQPAKKRLNFGQTGDTESVPDPQPIGEPPAAPSGVGSLTMASCGGAPVADNNEGADGVGSSSGNWHCDSQWLGDRVITTSTRTWALPTYNNHLYKQISNSTSGGSSNDNAYFGYSTPWGYFDFNRFHCHFSPRDWQRLINNNWGFRPKRLNFKLFNIQVKEVTDNNGVKTIANNLTSTVQVFTDSDYQLPYVLGSAHEGCLPPFPADVFMIPQYGYLTLNDGSQAVGRSSFYCLEYFPSQMLRTGNNFQFSYEFENVPFHSSYAHSQSLDRLMNPLIDQYLYYLSKTINGSGQNQQTLKFSVAGPSNMAVQGRNYIPGPSYRQQRVSTTVTQNNNSEIAWPGASSWALNGRNSLMNPGPAMASHKEGEDRFFPLSGSLIFGKQGTGRDNVDADKVMITNEEEIKTTNPVATESYGQVATNHQSAQAQAQTGWVQNQGILPGMVWQDRDVYLQGPIWAKIPHTDGNFHPSPLMGGFGMKHPPPQILIKNTPVPADPPTAFNKDKLNSFITQYSTGQVSVEIEWELQKENSKRWNPEIQYTSNLCKSNNVEFAVNTEGVYSEPRPIGTRYLTRNL

SEQ ID NO: 1199 - protein, 736 aa, synthetic construct
MAADGYLPDWLEDNLSEGIREWWALKPGAPQPKANQQHQDNARGLVLPGYKYLGPGNGLDKGEPVNAADAAALEHDKAYDQQLKAGDNPYLKYNHADAEFQERLKEDTSFGGNLGRAVFQAKKRLLEPLGLVEEAAKTAPGKKRPVEQSPQEPDSSAGIGKSGAQPAKKRLNFGQTGDTESVPDPQPIGEPPAAPSGVGSLTMASCGGAPVADNNEGADGVGSSSGNWHCDSQWLGDRVITTSTRTWALPTYNNHLYKQISNSTSGGSSNDNAYFGYSTPWGYFDFNRFHCHFSPRDWQRLINNNWGFRPKRLNFKLFNIQVKEVTDNNGVKTIANNLTSTVQVFTDSDYQLPYVLGSAHEGCLPPFPADVFMIPQYGYLTLNDGSQAVGRSSFYCLEYFPSQMLRTGNNFQFSYEFENVPFHSSYAHSQSLDRLMNPLIDQYLYYLSKTINGSGQNQQTLKFSVAGPSNMAVQGRNYIPGPSYRQQRVSTTVTQNNNSEFAWPRASSWALNGRNSLMNPGPAMASHKEGEDRFFPLSGSLIFGKQGTGRDNVDADKVMITNEEEIKTTNPVATESYGQVATNHQSAQAQAQTGWVQNQGILPGMVWQDRDVYLQGPIWAKIPHTDGNFHPSPLMGGFGMKHPPPQILIKNTPVPADPPTAFNKDKLNSFITQYSTGQVSVEIEWELQKENSKRWNPEIQYTSNLCKSNNVEFAVNTEGVYSEPRPIGTRYLTRNL

SEQ ID NO: 1200 - protein, 736 aa, synthetic construct
MAADGYLPDWLEDNLSEGIREWWALKPGAPQPKANQQHQDNARGLVLPGYKYLGPGNGLDKGEPVNAADAAALEHDKAYDQQLKAGDNPYLKYNHADAEFQERLKEDTSFGGNLGRAVFQAKKRLLEPLGLVEEAAKTAPGKKRPVEQSPQEPDSSAGIGKSGAQPAKKRLNFGQTGDTESVPDPQPIGEPPAAPSGVGSLTMASCGGAPVADNNEGADGVGSSSGNWHCDSQWLGDRVITTSTRTWALPTYNNHLYKQISNSTSGGSSNDNAYFGYSTPWGYFDFNRFHCHFSPRDWQRLINNNWGFRPKRLNFKLFNIQVKEVTDNNGVKTIANNLTSTVQVFTDSDYQLPYVLGSAHEGCLPPFPADVFMIPQYGYLTLNDGSQAVGRSSFYCLEYFPSQMLRTGNNFQFSYEFENVPFHSSYAHSQSLDRLMNPLIDQYLYYLSKTINGSGQNQQTLKFSVAGPSNMAVQGRNYIPGPSYRQQRVSTTVTQNNNSEIAWPRASSWALNGRNSLMNPGPAMASHKEGEDRFFPLSGSLIFGKQGTGRDNVDADKVMITNEEEIKTTNPVATESYGQVATNHQSAQAQAQTGWVQNQGILPGMVWQDRDVYLQGPIWAKIPHTDGNFHPSPLMGGFGMKHPPPQILIKNTPVPADPPTAFNKDKLNSFITQYSTGQVSVEIEWELQKENSKRWNPEIQYTSNLCKSNNVEFAVNTEGVYSEPRPIGTRYLTRNL

SEQ ID NO: 1201 - protein, 736 aa, synthetic construct
MAADGYLPDWLEDNLSEGIREWWALKPGAPQPKANQQHQDNARGLVLPGYKYLGPGNGLDKGEPVNAADAAALEHDKAYDQQLKAGDNPYLKYNHADAEFQERLKEDTSFGGNLGRAVFQAKKRLLEPLGLVEEAAKTAPGKKRPVEQSPQEPDSSAGIGKSGAQPAKKRLNFGQTGDTESVPDPQPIGEPPAAPSGVGSLTMASCGGAPVADNNEGADGVGSSSGNWHCDSQWLGDRVITTSTRTWALPTYNNHLYKQISNSTSGGSSNDNAYFGYSTPWGYFDFNRFHCHFSPRDWQRLINNNWGFRPKRLNFKLFNIQVKEVTDNNGVKTIANNLTSTVQVFGDSDYQLPYVLGSAHEGCLPPFPADVFMIPQYGYLTLNDGSQAVGRSSFYCLEYFPSQMLRTGNNFQFSYEFENVPFHSSYAHSQSLDRLMNPLIDQYLYYLSKTINGSGQNQQTLKFSVAGPSNMAVQGRNYIPGPSYRQQRVSTTVTQNNNSEFAWPGASSWALNGRNSLMNPGPAMASHKEGEDRFFPLSGSLIFGKQGTGRDNVDADKVMITNEEEIKTTNPVATESYGQVATNHQSAQAQAQTGWVQNQGILPGMVWQDRDVYLQGPIWAKIPHTDGNFHPSPLMGGFGMKHPPPQILIKNTPVPADPPTAFNKDKLNSFITQYSTGQVSVEIEWELQKENSKRWNPEIQYTSNLYKSNNVEFAVNTEGVYSEPRPIGTRYLTRNL

SEQ ID NO: 1202 - protein, 736 aa, synthetic construct
MAADGYLPDWLEDNLSEGIREWWALKPGAPQPKANQQHQDNARGLVLPGYKYLGPGNGLDKGEPVNAADAAALEHDKAYDQQLKAGDNPYLKYNHADAEFQERLKEDTSFGGNLGRAVFQAKKRLLEPLGLVEEAAKTAPGKKRPVEQSPQEPDSSAGIGKSGAQPAKKRLNFGQTGDTESVPDPQPIGEPPAAPSGVGSLTMASCGGAPVADNNEGADGVGSSSGNWHCDSQWLGDRVITTSTRTWALPTYNNHLYKQISNSTSGGSSNDNAYFGYSTPWGYFDFNRFHCHFSPRDWQRLINNNWGFRPKRLNFKLFNIQVKEVTDNNGVKTIANNLTSTVQVFGDSDYQLPYVLGSAHEGCLPPFPADVFMIPQYGYLTLNDGSQAVGRSSFYCLEYFPSQMLRTGNNFQFSYEFENVPFHSSYAHSQSLDRLMNPLIDQYLYYLSKTINGSGQNQQTLKFSVAGPSNMAVQGRNYIPGPSYRQQRVSTTVTQNNNSEIAWPGASSWALNGRNSLMNPGPAMASHKEGEDRFFPLSGSLIFGKQGTGRDNVDADKVMITNEEEIKTTNPVATESYGQVATNHQSAQAQAQTGWVQNQGILPGMVWQDRDVYLQGPIWAKIPHTDGNFHPSPLMGGFGMKHPPPQILIKNTPVPADPPTAFNKDKLNSFITQYSTGQVSVEIEWELQKENSKRWNPEIQYTSNLYKSNNVEFAVNTEGVYSEPRPIGTRYLTRNL

SEQ ID NO: 1203 - protein, 736 aa, synthetic construct
MAADGYLPDWLEDNLSEGIREWWALKPGAPQPKANQQHQDNARGLVLPGYKYLGPGNGLDKGEPVNAADAAALEHDKAYDQQLKAGDNPYLKYNHADAEFQERLKEDTSFGGNLGRAVFQAKKRLLEPLGLVEEAAKTAPGKKRPVEQSPQEPDSSAGIGKSGAQPAKKRLNFGQTGDTESVPDPQPIGEPPAAPSGVGSLTMASCGGAPVADNNEGADGVGSSSGNWHCDSQWLGDRVITTSTRTWALPTYNNHLYKQISNSTSGGSSNDNAYFGYSTPWGYFDFNRFHCHFSPRDWQRLINNNWGFRPKRLNFKLFNIQVKEVTDNNGVKTIANNLTSTVQVFGDSDYQLPYVLGSAHEGCLPPFPADVFMIPQYGYLTLNDGSQAVGRSSFYCLEYFPSQMLRTGNNFQFSYEFENVPFHSSYAHSQSLDRLMNPLIDQYLYYLSKTINGSGQNQQTLKFSVAGPSNMAVQGRNYIPGPSYRQQRVSTTVTQNNNSEFAWPRASSWALNGRNSLMNPGPAMASHKEGEDRFFPLSGSLIFGKQGTGRDNVDADKVMITNEEEIKTTNPVATESYGQVATNHQSAQAQAQTGWVQNQGILPGMVWQDRDVYLQGPIWAKIPHTDGNFHPSPLMGGFGMKHPPPQILIKNTPVPADPPTAFNKDKLNSFITQYSTGQVSVEIEWELQKENSKRWNPEIQYTSNLYKSNNVEFAVNTEGVYSEPRPIGTRYLTRNL

SEQ ID NO: 1204 - protein, 736 aa, synthetic construct
MAADGYLPDWLEDNLSEGIREWWALKPGAPQPKANQQHQDNARGLVLPGYKYLGPGNGLDKGEPVNAADAAALEHDKAYDQQLKAGDNPYLKYNHADAEFQERLKEDTSFGGNLGRAVFQAKKRLLEPLGLVEEAAKTAPGKKRPVEQSPQEPDSSAGIGKSGAQPAKKRLNFGQTGDTESVPDPQPIGEPPAAPSGVGSLTMASCGGAPVADNNEGADGVGSSSGNWHCDSQWLGDRVITTSTRTWALPTYNNHLYKQISNSTSGGSSNDNAYFGYSTPWGYFDFNRFHCHFSPRDWQRLINNNWGFRPKRLNFKLFNIQVKEVTDNNGVKTIANNLTSTVQVFGDSDYQLPYVLGSAHEGCLPPFPADVFMIPQYGYLTLNDGSQAVGRSSFYCLEYFPSQMLRTGNNFQFSYEFENVPFHSSYAHSQSLDRLMNPLIDQYLYYLSKTINGSGQNQQTLKFSVAGPSNMAVQGRNYIPGPSYRQQRVSTTVTQNNNSEFAWPGASSWALNGRNSLMNPGPAMASHKEGEDRFFPLSGSLIFGKQGTGRDNVDADKVMITNEEEIKTTNPVATESYGQVATNHQSAQAQAQTGWVQNQGILPGMVWQDRDVYLQGPIWAKIPHTDGNFHPSPLMGGFGMKHPPPQILIKNTPVPADPPTAFNKDKLNSFITQYSTGQVSVEIEWELQKENSKRWNPEIQYTSNLCKSNNVEFAVNTEGVYSEPRPIGTRYLTRNL

SEQ ID NO: 1205 - protein, 736 aa, synthetic construct
MAADGYLPDWLEDNLSEGIREWWALKPGAPQPKANQQHQDNARGLVLPGYKYLGPGNGLDKGEPVNAADAAALEHDKAYDQQLKAGDNPYLKYNHADAEFQERLKEDTSFGGNLGRAVFQAKKRLLEPLGLVEEAAKTAPGKKRPVEQSPQEPDSSAGIGKSGAQPAKKRLNFGQTGDTESVPDPQPIGEPPAAPSGVGSLTMASCGGAPVADNNEGADGVGSSSGNWHCDSQWLGDRVITTSTRTWALPTYNNHLYKQISNSTSGGSSNDNAYFGYSTPWGYFDFNRFHCHFSPRDWQRLINNNWGFRPKRLNFKLFNIQVKEVTDNNGVKTIANNLTSTVQVFGDSDYQLPYVLGSAHEGCLPPFPADVFMIPQYGYLTLNDGSQAVGRSSFYCLEYFPSQMLRTGNNFQFSYEFENVPFHSSYAHSQSLDRLMNPLIDQYLYYLSKTINGSGQNQQTLKFSVAGPSNMAVQGRNYIPGPSYRQQRVSTTVTQNNNSEIAWPRASSWALNGRNSLMNPGPAMASHKEGEDRFFPLSGSLIFGKQGTGRDNVDADKVMITNEEEIKTTNPVATESYGQVATNHQSAQAQAQTGWVQNQGILPGMVWQDRDVYLQGPIWAKIPHTDGNFHPSPLMGGFGMKHPPPQILIKNTPVPADPPTAFNKDKLNSFITQYSTGQVSVEIEWELQKENSKRWNPEIQYTSNLYKSNNVEFAVNTEGVYSEPRPIGTRYLTRNL

SEQ ID NO: 1206 - protein, 736 aa, synthetic construct
MAADGYLPDWLEDNLSEGIREWWALKPGAPQPKANQQHQDNARGLVLPGYKYLGPGNGLDKGEPVNAADAAALEHDKAYDQQLKAGDNPYLKYNHADAEFQERLKEDTSFGGNLGRAVFQAKKRLLEPLGLVEEAAKTAPGKKRPVEQSPQEPDSSAGIGKSGAQPAKKRLNFGQTGDTESVPDPQPIGEPPAAPSGVGSLTMASCGGAPVADNNEGADGVGSSSGNWHCDSQWLGDRVITTSTRTWALPTYNNHLYKQISNSTSGGSSNDNAYFGYSTPWGYFDFNRFHCHFSPRDWQRLINNNWGFRPKRLNFKLFNIQVKEVTDNNGVKTIANNLTSTVQVFGDSDYQLPYVLGSAHEGCLPPFPADVFMIPQYGYLTLNDGSQAVGRSSFYCLEYFPSQMLRTGNNFQFSYEFENVPFHSSYAHSQSLDRLMNPLIDQYLYYLSKTINGSGQNQQTLKFSVAGPSNMAVQGRNYIPGPSYRQQRVSTTVTQNNNSEIAWPGASSWALNGRNSLMNPGPAMASHKEGEDRFFPLSGSLIFGKQGTGRDNVDADKVMITNEEEIKTTNPVATESYGQVATNHQSAQAQAQTGWVQNQGILPGMVWQDRDVYLQGPIWAKIPHTDGNFHPSPLMGGFGMKHPPPQILIKNTPVPADPPTAFNKDKLNSFITQYSTGQVSVEIEWELQKENSKRWNPEIQYTSNLCKSNNVEFAVNTEGVYSEPRPIGTRYLTRNL

SEQ ID NO: 1207 - protein, 736 aa, synthetic construct
MAADGYLPDWLEDNLSEGIREWWALKPGAPQPKANQQHQDNARGLVLPGYKYLGPGNGLDKGEPVNAADAAALEHDKAYDQQLKAGDNPYLKYNHADAEFQERLKEDTSFGGNLGRAVFQAKKRLLEPLGLVEEAAKTAPGKKRPVEQSPQEPDSSAGIGKSGAQPAKKRLNFGQTGDTESVPDPQPIGEPPAAPSGVGSLTMASCGGAPVADNNEGADGVGSSSGNWHCDSQWLGDRVITTSTRTWALPTYNNHLYKQISNSTSGGSSNDNAYFGYSTPWGYFDFNRFHCHFSPRDWQRLINNNWGFRPKRLNFKLFNIQVKEVTDNNGVKTIANNLTSTVQVFGDSDYQLPYVLGSAHEGCLPPFPADVFMIPQYGYLTLNDGSQAVGRSSFYCLEYFPSQMLRTGNNFQFSYEFENVPFHSSYAHSQSLDRLMNPLIDQYLYYLSKTINGSGQNQQTLKFSVAGPSNMAVQGRNYIPGPSYRQQRVSTTVTQNNNSEFAWPRASSWALNGRNSLMNPGPAMASHKEGEDRFFPLSGSLIFGKQGTGRDNVDADKVMITNEEEIKTTNPVATESYGQVATNHQSAQAQAQTGWVQNQGILPGMVWQDRDVYLQGPIWAKIPHTDGNFHPSPLMGGFGMKHPPPQILIKNTPVPADPPTAFNKDKLNSFITQYSTGQVSVEIEWELQKENSKRWNPEIQYTSNLCKSNNVEFAVNTEGVYSEPRPIGTRYLTRNL

SEQ ID NO: 1208 - protein, 736 aa, synthetic construct
MAADGYLPDWLEDNLSEGIREWWALKPGAPQPKANQQHQDNARGLVLPGYKYLGPGNGLDKGEPVNAADAAALEHDKAYDQQLKAGDNPYLKYNHADAEFQERLKEDTSFGGNLGRAVFQAKKRLLEPLGLVEEAAKTAPGKKRPVEQSPQEPDSSAGIGKSGAQPAKKRLNFGQTGDTESVPDPQPIGEPPAAPSGVGSLTMASCGGAPVADNNEGADGVGSSSGNWHCDSQWLGDRVITTSTRTWALPTYNNHLYKQISNSTSGGSSNDNAYFGYSTPWGYFDFNRFHCHFSPRDWQRLINNNWGFRPKRLNFKLFNIQVKEVTDNNGVKTIANNLTSTVQVFGDSDYQLPYVLGSAHEGCLPPFPADVFMIPQYGYLTLNDGSQAVGRSSFYCLEYFPSQMLRTGNNFQFSYEFENVPFHSSYAHSQSLDRLMNPLIDQYLYYLSKTINGSGQNQQTLKFSVAGPSNMAVQGRNYIPGPSYRQQRVSTTVTQNNNSEIAWPRASSWALNGRNSLMNPGPAMASHKEGEDRFFPLSGSLIFGKQGTGRDNVDADKVMITNEEEIKTTNPVATESYGQVATNHQSAQAQAQTGWVQNQGILPGMVWQDRDVYLQGPIWAKIPHTDGNFHPSPLMGGFGMKHPPPQILIKNTPVPADPPTAFNKDKLNSFITQYSTGQVSVEIEWELQKENSKRWNPEIQYTSNLCKSNNVEFAVNTEGVYSEPRPIGTRYLTRNL

SEQ ID NO: 1209 - protein, 736 aa, synthetic construct
MAADGYLPDWLEDNLSEGIREWWALKPGAPQPKANQQHQDNARGLVLPGYKYLGPGNGLDKGEPVNAADAAALEHDKAYDQQLKAGDNPYLKYNHADAEFQERLKEDTSFGGNLGRAVFQAKKRLLEPLGLVEEAAKTAPGKKRPVEQSPQEPDSSAGIGKSGAQPAKKRLNFGQTGDTESVPDPQPIGEPPAAPSGVGSLTMASCGGAPVADNNEGADGVGSSSGNWHCDSQWLGDRVITTSTRTWALPTYNNHLYKQISNSTSGGSSNDNAYFGYSTPWGYFDFNRFHCHFSPRDWQRLINNNWGFRPKRLNFKLFNIQVKEVTDNNGVKTIANNLTSTVQVFADSDYQLPYVLGSAHEGCLPPFPADVFMIPQYGYLTLNDGSQAVGRSSFYCLEYFPSQMLRTGNNFQFSYEFENVPFHSSYAHSQSLDRLMNPLIDQYLYYLSKTINGSGQNQQTLKFSVAGPSNMAVQGRNYIPGPSYRQQRVSTTVTQNNNSEFAWPGASSWALNGRNSLMNPGPAMASHKEGEDRFFPLSGSLIFGKQGTGRDNVDADKVMITNEEEIKTTNPVATESYGQVATNHQSAQAQAQTGWVQNQGILPGMVWQDRDVYLQGPIWAKIPHTDGNFHPSPLMGGFGMKHPPPQILIKNTPVPADPPTAFNKDKLNSFITQYSTGQVSVEIEWELQKENSKRWNPEIQYTSNLYKSNNVEFAVNTEGVYSEPRPIGTRYLTRNL

SEQ ID NO: 1210 - protein, 736 aa, synthetic construct
MAADGYLPDWLEDNLSEGIREWWALKPGAPQPKANQQHQDNARGLVLPGYKYLGPGNGLDKGEPVNAADAAALEHDKAYDQQLKAGDNPYLKYNHADAEFQERLKEDTSFGGNLGRAVFQAKKRLLEPLGLVEEAAKTAPGKKRPVEQSPQEPDSSAGIGKSGAQPAKKRLNFGQTGDTESVPDPQPIGEPPAAPSGVGSLTMASCGGAPVADNNEGADGVGSSSGNWHCDSQWLGDRVITTSTRTWALPTYNNHLYKQISNSTSGGSSNDNAYFGYSTPWGYFDFNRFHCHFSPRDWQRLINNNWGFRPKRLNFKLFNIQVKEVTDNNGVKTIANNLTSTVQVFADSDYQLPYVLGSAHEGCLPPFPADVFMIPQYGYLTLNDGSQAVGRSSFYCLEYFPSQMLRTGNNFQFSYEFENVPFHSSYAHSQSLDRLMNPLIDQYLYYLSKTINGSGQNQQTLKFSVAGPSNMAVQGRNYIPGPSYRQQRVSTTVTQNNNSEIAWPGASSWALNGRNSLMNPGPAMASHKEGEDRFFPLSGSLIFGKQGTGRDNVDADKVMITNEEEIKTTNPVATESYGQVATNHQSAQAQAQTGWVQNQGILPGMVWQDRDVYLQGPIWAKIPHTDGNFHPSPLMGGFGMKHPPPQILIKNTPVPADPPTAFNKDKLNSFITQYSTGQVSVEIEWELQKENSKRWNPEIQYTSNLYKSNNVEFAVNTEGVYSEPRPIGTRYLTRNL

SEQ ID NO: 1211 - protein, 736 aa, synthetic construct
MAADGYLPDWLEDNLSEGIREWWALKPGAPQPKANQQHQDNARGLVLPGYKYLGPGNGLDKGEPVNAADAAALEHDKAYDQQLKAGDNPYLKYNHADAEFQERLKEDTSFGGNLGRAVFQAKKRLLEPLGLVEEAAKTAPGKKRPVEQSPQEPDSSAGIGKSGAQPAKKRLNFGQTGDTESVPDPQPIGEPPAAPSGVGSLTMASCGGAPVADNNEGADGVGSSSGNWHCDSQWLGDRVITTSTRTWALPTYNNHLYKQISNSTSGGSSNDNAYFGYSTPWGYFDFNRFHCHFSPRDWQRLINNNWGFRPKRLNFKLFNIQVKEVTDNNGVKTIANNLTSTVQVFADSDYQLPYVLGSAHEGCLPPFPADVFMIPQYGYLTLNDGSQAVGRSSFYCLEYFPSQMLRTGNNFQFSYEFENVPFHSSYAHSQSLDRLMNPLIDQYLYYLSKTINGSGQNQQTLKFSVAGPSNMAVQGRNYIPGPSYRQQRVSTTVTQNNNSEFAWPRASSWALNGRNSLMNPGPAMASHKEGEDRFFPLSGSLIFGKQGTGRDNVDADKVMITNEEEIKTTNPVATESYGQVATNHQSAQAQAQTGWVQNQGILPGMVWQDRDVYLQGPIWAKIPHTDGNFHPSPLMGGFGMKHPPPQILIKNTPVPADPPTAFNKDKLNSFITQYSTGQVSVEIEWELQKENSKRWNPEIQYTSNLYKSNNVEFAVNTEGVYSEPRPIGTRYLTRNL

SEQ ID NO: 1212 - protein, 736 aa, synthetic construct
MAADGYLPDWLEDNLSEGIREWWALKPGAPQPKANQQHQDNARGLVLPGYKYLGPGNGLDKGEPVNAADAAALEHDKAYDQQLKAGDNPYLKYNHADAEFQERLKEDTSFGGNLGRAVFQAKKRLLEPLGLVEEAAKTAPGKKRPVEQSPQEPDSSAGIGKSGAQPAKKRLNFGQTGDTESVPDPQPIGEPPAAPSGVGSLTMASCGGAPVADNNEGADGVGSSSGNWHCDSQWLGDRVITTSTRTWALPTYNNHLYKQISNSTSGGSSNDNAYFGYSTPWGYFDFNRFHCHFSPRDWQRLINNNWGFRPKRLNFKLFNIQVKEVTDNNGVKTIANNLTSTVQVFADSDYQLPYVLGSAHEGCLPPFPADVFMIPQYGYLTLNDGSQAVGRSSFYCLEYFPSQMLRTGNNFQFSYEFENVPFHSSYAHSQSLDRLMNPLIDQYLYYLSKTINGSGQNQQTLKFSVAGPSNMAVQGRNYIPGPSYRQQRVSTTVTQNNNSEFAWPGASSWALNGRNSLMNPGPAMASHKEGEDRFFPLSGSLIFGKQGTGRDNVDADKVMITNEEEIKTTNPVATESYGQVATNHQSAQAQAQTGWVQNQGILPGMVWQDRDVYLQGPIWAKIPHTDGNFHPSPLMGGFGMKHPPPQILIKNTPVPADPPTAFNKDKLNSFITQYSTGQVSVEIEWELQKENSKRWNPEIQYTSNLCKSNNVEFAVNTEGVYSEPRPIGTRYLTRNL

SEQ ID NO: 1213 - protein, 736 aa, synthetic construct
MAADGYLPDWLEDNLSEGIREWWALKPGAPQPKANQQHQDNARGLVLPGYKYLGPGNGLDKGEPVNAADAAALEHDKAYDQQLKAGDNPYLKYNHADAEFQERLKEDTSFGGNLGRAVFQAKKRLLEPLGLVEEAAKTAPGKKRPVEQSPQEPDSSAGIGKSGAQPAKKRLNFGQTGDTESVPDPQPIGEPPAAPSGVGSLTMASCGGAPVADNNEGADGVGSSSGNWHCDSQWLGDRVITTSTRTWALPTYNNHLYKQISNSTSGGSSNDNAYFGYSTPWGYFDFNRFHCHFSPRDWQRLINNNWGFRPKRLNFKLFNIQVKEVTDNNGVKTIANNLTSTVQVFADSDYQLPYVLGSAHEGCLPPFPADVFMIPQYGYLTLNDGSQAVGRSSFYCLEYFPSQMLRTGNNFQFSYEFENVPFHSSYAHSQSLDRLMNPLIDQYLYYLSKTINGSGQNQQTLKFSVAGPSNMAVQGRNYIPGPSYRQQRVSTTVTQNNNSEIAWPRASSWALNGRNSLMNPGPAMASHKEGEDRFFPLSGSLIFGKQGTGRDNVDADKVMITNEEEIKTTNPVATESYGQVATNHQSAQAQAQTGWVQNQGILPGMVWQDRDVYLQGPIWAKIPHTDGNFHPSPLMGGFGMKHPPPQILIKNTPVPADPPTAFNKDKLNSFITQYSTGQVSVEIEWELQKENSKRWNPEIQYTSNLYKSNNVEFAVNTEGVYSEPRPIGTRYLTRNL

SEQ ID NO: 1214 - protein, 736 aa, synthetic construct
MAADGYLPDWLEDNLSEGIREWWALKPGAPQPKANQQHQDNARGLVLPGYKYLGPGNGLDKGEPVNAADAAALEHDKAYDQQLKAGDNPYLKYNHADAEFQERLKEDTSFGGNLGRAVFQAKKRLLEPLGLVEEAAKTAPGKKRPVEQSPQEPDSSAGIGKSGAQPAKKRLNFGQTGDTESVPDPQPIGEPPAAPSGVGSLTMASCGGAPVADNNEGADGVGSSSGNWHCDSQWLGDRVITTSTRTWALPTYNNHLYKQISNSTSGGSSNDNAYFGYSTPWGYFDFNRFHCHFSPRDWQRLINNNWGFRPKRLNFKLFNIQVKEVTDNNGVKTIANNLTSTVQVFADSDYQLPYVLGSAHEGCLPPFPADVFMIPQYGYLTLNDGSQAVGRSSFYCLEYFPSQMLRTGNNFQFSYEFENVPFHSSYAHSQSLDRLMNPLIDQYLYYLSKTINGSGQNQQTLKFSVAGPSNMAVQGRNYIPGPSYRQQRVSTTVTQNNNSEIAWPGASSWALNGRNSLMNPGPAMASHKEGEDRFFPLSGSLIFGKQGTGRDNVDADKVMITNEEEIKTTNPVATESYGQVATNHQSAQAQAQTGWVQNQGILPGMVWQDRDVYLQGPIWAKIPHTDGNFHPSPLMGGFGMKHPPPQILIKNTPVPADPPTAFNKDKLNSFITQYSTGQVSVEIEWELQKENSKRWNPEIQYTSNLCKSNNVEFAVNTEGVYSEPRPIGTRYLTRNL

SEQ ID NO: 1215 - protein, 736 aa, synthetic construct
MAADGYLPDWLEDNLSEGIREWWALKPGAPQPKANQQHQDNARGLVLPGYKYLGPGNGLDKGEPVNAADAAALEHDKAYDQQLKAGDNPYLKYNHADAEFQERLKEDTSFGGNLGRAVFQAKKRLLEPLGLVEEAAKTAPGKKRPVEQSPQEPDSSAGIGKSGAQPAKKRLNFGQTGDTESVPDPQPIGEPPAAPSGVGSLTMASCGGAPVADNNEGADGVGSSSGNWHCDSQWLGDRVITTSTRTWALPTYNNHLYKQISNSTSGGSSNDNAYFGYSTPWGYFDFNRFHCHFSPRDWQRLINNNWGFRPKRLNFKLFNIQVKEVTDNNGVKTIANNLTSTVQVFADSDYQLPYVLGSAHEGCLPPFPADVFMIPQYGYLTLNDGSQAVGRSSFYCLEYFPSQMLRTGNNFQFSYEFENVPFHSSYAHSQSLDRLMNPLIDQYLYYLSKTINGSGQNQQTLKFSVAGPSNMAVQGRNYIPGPSYRQQRVSTTVTQNNNSEFAWPRASSWALNGRNSLMNPGPAMASHKEGEDRFFPLSGSLIFGKQGTGRDNVDADKVMITNEEEIKTTNPVATESYGQVATNHQSAQAQAQTGWVQNQGILPGMVWQDRDVYLQGPIWAKIPHTDGNFHPSPLMGGFGMKHPPPQILIKNTPVPADPPTAFNKDKLNSFITQYSTGQVSVEIEWELQKENSKRWNPEIQYTSNLCKSNNVEFAVNTEGVYSEPRPIGTRYLTRNL

SEQ ID NO: 1216 - protein, 736 aa, synthetic construct
MAADGYLPDWLEDNLSEGIREWWALKPGAPQPKANQQHQDNARGLVLPGYKYLGPGNGLDKGEPVNAADAAALEHDKAYDQQLKAGDNPYLKYNHADAEFQERLKEDTSFGGNLGRAVFQAKKRLLEPLGLVEEAAKTAPGKKRPVEQSPQEPDSSAGIGKSGAQPAKKRLNFGQTGDTESVPDPQPIGEPPAAPSGVGSLTMASCGGAPVADNNEGADGVGSSSGNWHCDSQWLGDRVITTSTRTWALPTYNNHLYKQISNSTSGGSSNDNAYFGYSTPWGYFDFNRFHCHFSPRDWQRLINNNWGFRPKRLNFKLFNIQVKEVTDNNGVKTIANNLTSTVQVFADSDYQLPYVLGSAHEGCLPPFPADVFMIPQYGYLTLNDGSQAVGRSSFYCLEYFPSQMLRTGNNFQFSYEFENVPFHSSYAHSQSLDRLMNPLIDQYLYYLSKTINGSGQNQQTLKFSVAGPSNMAVQGRNYIPGPSYRQQRVSTTVTQNNNSEIAWPRASSWALNGRNSLMNPGPAMASHKEGEDRFFPLSGSLIFGKQGTGRDNVDADKVMITNEEEIKTTNPVATESYGQVATNHQSAQAQAQTGWVQNQGILPGMVWQDRDVYLQGPIWAKIPHTDGNFHPSPLMGGFGMKHPPPQILIKNTPVPADPPTAFNKDKLNSFITQYSTGQVSVEIEWELQKENSKRWNPEIQYTSNLCKSNNVEFAVNTEGVYSEPRPIGTRYLTRNL

SEQ ID NO: 1217 - protein, 736 aa, synthetic construct
MAADGYLPDWLEDNLSEGIREWWALKPGAPQPKANQQHQDNARGLVLPGYKYLGPGNGLDKGEPINAADAAALEHDKAYDQQLKAGDNPYLKYNHADAEFQERLKEDTSFGGNLGRAVFQAKKRLLEPLGLVEEAAKTAPGKKRPVEQSPQEPDSSAGIGKSGAQPAKKRLNFGQTGDTESVPDPQPIGEPPAAPSGVGSLTMASGGGAPVADNNEGADGVGSSSGNWHCDSQWLGDRVITTSTRTWALPTYNNHLYKQISNSTSGGSSNDNAYFGYSTPWGYFDFNRFHCHFSPRDWQRLINNNWGFRPKRLNFKLFNIQVKEVTDNNGVKTIANNLTSTVQVFGDSDYQLPYVLGSAHEGCLPPFPADVFMIPQYGYLTLNDGSQAVGRSSFYCLEYFPSQMLRTGNNFQFSYEFENVPFHSSYAHSQSLDRLMNPLIDQYLYYLSKTINGSGQNQQTLKFSVAGPSNMAVQGRNYIPGPSYRQQRVSTTVTQNNNSEFAWPGASSWALNGRNSLMNPGPAMASHKEGEDRFFPLSGSLIFGKQGTGRDNVDADKVMITNEEEIKTTNPVATESYGQVATNHQSAQAQAQTGWVQNQGILPGMVWQDRDVYLQGPIWAKIPHTYGNFHPSPLMGGFGMKHPPPQILIKNTPVPADPPTAFNKDKLNSFITQYSTGQVSVEIEWELQKENSKRWNPEIQYTSNYYKSNNVEFAVNTEGVYSEPRPIGTRYLTRNL

SEQ ID NO: 1218 - protein, 736 aa, synthetic construct
MAADGYLPDWLEDNLSEGIREWWALKPGAPQPKANQQHQDNARGLVLPGYKYLGPGNGLDKGEPINAADAAALEHDKAYDQQLKAGDNPYLKYNHADAEFQERLKEDTSFGGNLGRAVFQAKKRLLEPLGLVEEAAKTAPGKKRPVEQSPQEPDSSAGIGKSGAQPAKKRLNFGQTGDTESVPDPQPIGEPPAAPSGVGSLTMASGGGAPVADNNEGADGVGSSSGNWHCDSQWLGDRVITTSTRTWALPTYNNHLYKQISNSTSGGSSNDNAYFGYSTPWGYFDFNRFHCHFSPRDWQRLINNNWGFRPKRLNFKLFNIQVKEVTDNNGVKTIANNLTSTVQVFGDSDYQLPYVLGSAHEGCLPPFPADVFMIPQYGYLTLNDGSQAVGRSSFYCLEYFPSQMLRTGNNFQFSYEFENVPFHSSYAHSQSLDRLMNPLIDQYLYYLSKTINGSGQNQQTLKFSVAGPSNMAVQGRNYIPGPSYRQQRVSTTVTQNNNSEIAWPGASSWALNGRNSLMNPGPAMASHKEGEDRFFPLSGSLIFGKQGTGRDNVDADKVMITNEEEIKTTNPVATESYGQVATNHQSAQAQAQTGWVQNQGILPGMVWQDRDVYLQGPIWAKIPHTYGNFHPSPLMGGFGMKHPPPQILIKNTPVPADPPTAFNKDKLNSFITQYSTGQVSVEIEWELQKENSKRWNPEIQYTSNYYKSNNVEFAVNTEGVYSEPRPIGTRYLTRNL

SEQ ID NO: 1219 - protein, 736 aa, synthetic construct
MAADGYLPDWLEDNLSEGIREWWALKPGAPQPKANQQHQDNARGLVLPGYKYLGPGNGLDKGEPINAADAAALEHDKAYDQQLKAGDNPYLKYNHADAEFQERLKEDTSFGGNLGRAVFQAKKRLLEPLGLVEEAAKTAPGKKRPVEQSPQEPDSSAGIGKSGAQPAKKRLNFGQTGDTESVPDPQPIGEPPAAPSGVGSLTMASGGGAPVADNNEGADGVGSSSGNWHCDSQWLGDRVITTSTRTWALPTYNNHLYKQISNSTSGGSSNDNAYFGYSTPWGYFDFNRFHCHFSPRDWQRLINNNWGFRPKRLNFKLFNIQVKEVTDNNGVKTIANNLTSTVQVFGDSDYQLPYVLGSAHEGCLPPFPADVFMIPQYGYLTLNDGSQAVGRSSFYCLEYFPSQMLRTGNNFQFSYEFENVPFHSSYAHSQSLDRLMNPLIDQYLYYLSKTINGSGQNQQTLKFSVAGPSNMAVQGRNYIPGPSYRQQRVSTTVTQNNNSEFAWPRASSWALNGRNSLMNPGPAMASHKEGEDRFFPLSGSLIFGKQGTGRDNVDADKVMITNEEEIKTTNPVATESYGQVATNHQSAQAQAQTGWVQNQGILPGMVWQDRDVYLQGPIWAKIPHTYGNFHPSPLMGGFGMKHPPPQILIKNTPVPADPPTAFNKDKLNSFITQYSTGQVSVEIEWELQKENSKRWNPEIQYTSNYYKSNNVEFAVNTEGVYSEPRPIGTRYLTRNL

SEQ ID NO: 1220 - protein, 736 aa, synthetic construct
MAADGYLPDWLEDNLSEGIREWWALKPGAPQPKANQQHQDNARGLVLPGYKYLGPGNGLDKGEPINAADAAALEHDKAYDQQLKAGDNPYLKYNHADAEFQERLKEDTSFGGNLGRAVFQAKKRLLEPLGLVEEAAKTAPGKKRPVEQSPQEPDSSAGIGKSGAQPAKKRLNFGQTGDTESVPDPQPIGEPPAAPSGVGSLTMASGGGAPVADNNEGADGVGSSSGNWHCDSQWLGDRVITTSTRTWALPTYNNHLYKQISNSTSGGSSNDNAYFGYSTPWGYFDFNRFHCHFSPRDWQRLINNNWGFRPKRLNFKLFNIQVKEVTDNNGVKTIANNLTSTVQVFGDSDYQLPYVLGSAHEGCLPPFPADVFMIPQYGYLTLNDGSQAVGRSSFYCLEYFPSQMLRTGNNFQFSYEFENVPFHSSYAHSQSLDRLMNPLIDQYLYYLSKTINGSGQNQQTLKFSVAGPSNMAVQGRNYIPGPSYRQQRVSTTVTQNNNSEFAWPGASSWALNGRNSLMNPGPAMASHKEGEDRFFPLSGSLIFGKQGTGRDNVDADKVMITNEEEIKTTNPVATESYGQVATNHQSAQAQAQTGWVQNQGILPGMVWQDRDVYLQGPIWAKIPHTYGNFHPSPLMGGFGMKHPPPQILIKNTPVPADPPTAFNKDKLNSFITQYSTGQVSVEIEWELQKENSKRWNPEIQYTSNYCKSNNVEFAVNTEGVYSEPRPIGTRYLTRNL

SEQ ID NO: 1221 - protein, 736 aa, synthetic construct
MAADGYLPDWLEDNLSEGIREWWALKPGAPQPKANQQHQDNARGLVLPGYKYLGPGNGLDKGEPINAADAAALEHDKAYDQQLKAGDNPYLKYNHADAEFQERLKEDTSFGGNLGRAVFQAKKRLLEPLGLVEEAAKTAPGKKRPVEQSPQEPDSSAGIGKSGAQPAKKRLNFGQTGDTESVPDPQPIGEPPAAPSGVGSLTMASGGGAPVADNNEGADGVGSSSGNWHCDSQWLGDRVITTSTRTWALPTYNNHLYKQISNSTSGGSSNDNAYFGYSTPWGYFDFNRFHCHFSPRDWQRLINNNWGFRPKRLNFKLFNIQVKEVTDNNGVKTIANNLTSTVQVFGDSDYQLPYVLGSAHEGCLPPFPADVFMIPQYGYLTLNDGSQAVGRSSFYCLEYFPSQMLRTGNNFQFSYEFENVPFHSSYAHSQSLDRLMNPLIDQYLYYLSKTINGSGQNQQTLKFSVAGPSNMAVQGRNYIPGPSYRQQRVSTTVTQNNNSEIAWPRASSWALNGRNSLMNPGPAMASHKEGEDRFFPLSGSLIFGKQGTGRDNVDADKVMITNEEEIKTTNPVATESYGQVATNHQSAQAQAQTGWVQNQGILPGMVWQDRDVYLQGPIWAKIPHTYGNFHPSPLMGGFGMKHPPPQILIKNTPVPADPPTAFNKDKLNSFITQYSTGQVSVEIEWELQKENSKRWNPEIQYTSNYYKSNNVEFAVNTEGVYSEPRPIGTRYLTRNL

SEQ ID NO: 1222 - protein, 736 aa, synthetic construct
MAADGYLPDWLEDNLSEGIREWWALKPGAPQPKANQQHQDNARGLVLPGYKYLGPGNGLDKGEPINAADAAALEHDKAYDQQLKAGDNPYLKYNHADAEFQERLKEDTSFGGNLGRAVFQAKKRLLEPLGLVEEAAKTAPGKKRPVEQSPQEPDSSAGIGKSGAQPAKKRLNFGQTGDTESVPDPQPIGEPPAAPSGVGSLTMASGGGAPVADNNEGADGVGSSSGNWHCDSQWLGDRVITTSTRTWALPTYNNHLYKQISNSTSGGSSNDNAYFGYSTPWGYFDFNRFHCHFSPRDWQRLINNNWGFRPKRLNFKLFNIQVKEVTDNNGVKTIANNLTSTVQVFGDSDYQLPYVLGSAHEGCLPPFPADVFMIPQYGYLTLNDGSQAVGRSSFYCLEYFPSQMLRTGNNFQFSYEFENVPFHSSYAHSQSLDRLMNPLIDQYLYYLSKTINGSGQNQQTLKFSVAGPSNMAVQGRNYIPGPSYRQQRVSTTVTQNNNSEIAWPGASSWALNGRNSLMNPGPAMASHKEGEDRFFPLSGSLIFGKQGTGRDNVDADKVMITNEEEIKTTNPVATESYGQVATNHQSAQAQAQTGWVQNQGILPGMVWQDRDVYLQGPIWAKIPHTYGNFHPSPLMGGFGMKHPPPQILIKNTPVPADPPTAFNKDKLNSFITQYSTGQVSVEIEWELQKENSKRWNPEIQYTSNYCKSNNVEFAVNTEGVYSEPRPIGTRYLTRNL

SEQ ID NO: 1223 - protein, 736 aa, synthetic construct
MAADGYLPDWLEDNLSEGIREWWALKPGAPQPKANQQHQDNARGLVLPGYKYLGPGNGLDKGEPINAADAAALEHDKAYDQQLKAGDNPYLKYNHADAEFQERLKEDTSFGGNLGRAVFQAKKRLLEPLGLVEEAAKTAPGKKRPVEQSPQEPDSSAGIGKSGAQPAKKRLNFGQTGDTESVPDPQPIGEPPAAPSGVGSLTMASGGGAPVADNNEGADGVGSSSGNWHCDSQWLGDRVITTSTRTWALPTYNNHLYKQISNSTSGGSSNDNAYFGYSTPWGYFDFNRFHCHFSPRDWQRLINNNWGFRPKRLNFKLFNIQVKEVTDNNGVKTIANNLTSTVQVFGDSDYQLPYVLGSAHEGCLPPFPADVFMIPQYGYLTLNDGSQAVGRSSFYCLEYFPSQMLRTGNNFQFSYEFENVPFHSSYAHSQSLDRLMNPLIDQYLYYLSKTINGSGQNQQTLKFSVAGPSNMAVQGRNYIPGPSYRQQRVSTTVTQNNNSEFAWPRASSWALNGRNSLMNPGPAMASHKEGEDRFFPLSGSLIFGKQGTGRDNVDADKVMITNEEEIKTTNPVATESYGQVATNHQSAQAQAQTGWVQNQGILPGMVWQDRDVYLQGPIWAKIPHTYGNFHPSPLMGGFGMKHPPPQILIKNTPVPADPPTAFNKDKLNSFITQYSTGQVSVEIEWELQKENSKRWNPEIQYTSNYCKSNNVEFAVNTEGVYSEPRPIGTRYLTRNL

SEQ ID NO: 1224 - protein, 736 aa, synthetic construct
MAADGYLPDWLEDNLSEGIREWWALKPGAPQPKANQQHQDNARGLVLPGYKYLGPGNGLDKGEPINAADAAALEHDKAYDQQLKAGDNPYLKYNHADAEFQERLKEDTSFGGNLGRAVFQAKKRLLEPLGLVEEAAKTAPGKKRPVEQSPQEPDSSAGIGKSGAQPAKKRLNFGQTGDTESVPDPQPIGEPPAAPSGVGSLTMASGGGAPVADNNEGADGVGSSSGNWHCDSQWLGDRVITTSTRTWALPTYNNHLYKQISNSTSGGSSNDNAYFGYSTPWGYFDFNRFHCHFSPRDWQRLINNNWGFRPKRLNFKLFNIQVKEVTDNNGVKTIANNLTSTVQVFGDSDYQLPYVLGSAHEGCLPPFPADVFMIPQYGYLTLNDGSQAVGRSSFYCLEYFPSQMLRTGNNFQFSYEFENVPFHSSYAHSQSLDRLMNPLIDQYLYYLSKTINGSGQNQQTLKFSVAGPSNMAVQGRNYIPGPSYRQQRVSTTVTQNNNSEIAWPRASSWALNGRNSLMNPGPAMASHKEGEDRFFPLSGSLIFGKQGTGRDNVDADKVMITNEEEIKTTNPVATESYGQVATNHQSAQAQAQTGWVQNQGILPGMVWQDRDVYLQGPIWAKIPHTYGNFHPSPLMGGFGMKHPPPQILIKNTPVPADPPTAFNKDKLNSFITQYSTGQVSVEIEWELQKENSKRWNPEIQYTSNYCKSNNVEFAVNTEGVYSEPRPIGTRYLTRNL

SEQ ID NO: 1225 - protein, 736 aa, synthetic construct
MAADGYLPDWLEDNLSEGIREWWALKPGAPQPKANQQHQDNARGLVLPGYKYLGPGNGLDKGEPINAADAAALEHDKAYDQQLKAGDNPYLKYNHADAEFQERLKEDTSFGGNLGRAVFQAKKRLLEPLGLVEEAAKTAPGKKRPVEQSPQEPDSSAGIGKSGAQPAKKRLNFGQTGDTESVPDPQPIGEPPAAPSGVGSLTMASGGGAPVADNNEGADGVGSSSGNWHCDSQWLGDRVITTSTRTWALPTYNNHLYKQISNSTSGGSSNDNAYFGYSTPWGYFDFNRFHCHFSPRDWQRLINNNWGFRPKRLNFKLFNIQVKEVTDNNGVKTIANNLTSTVQVFTDSDYQLPYVLGSAHEGCLPPFPADVFMIPQYGYLTLNDGSQAVGRSSFYCLEYFPSQMLRTGNNFQFSYEFENVPFHSSYAHSQSLDRLMNPLIDQYLYYLSKTINGSGQNQQTLKFSVAGPSNMAVQGRNYIPGPSYRQQRVSTTVTQNNNSEFAWPGASSWALNGRNSLMNPGPAMASHKEGEDRFFPLSGSLIFGKQGTGRDNVDADKVMITNEEEIKTTNPVATESYGQVATNHQSAQAQAQTGWVQNQGILPGMVWQDRDVYLQGPIWAKIPHTYGNFHPSPLMGGFGMKHPPPQILIKNTPVPADPPTAFNKDKLNSFITQYSTGQVSVEIEWELQKENSKRWNPEIQYTSNLYKSNNVEFAVNTEGVYSEPRPIGTRYLTRNL

SEQ ID NO: 1226 - protein, 736 aa, synthetic construct
MAADGYLPDWLEDNLSEGIREWWALKPGAPQPKANQQHQDNARGLVLPGYKYLGPGNGLDKGEPINAADAAALEHDKAYDQQLKAGDNPYLKYNHADAEFQERLKEDTSFGGNLGRAVFQAKKRLLEPLGLVEEAAKTAPGKKRPVEQSPQEPDSSAGIGKSGAQPAKKRLNFGQTGDTESVPDPQPIGEPPAAPSGVGSLTMASGGGAPVADNNEGADGVGSSSGNWHCDSQWLGDRVITTSTRTWALPTYNNHLYKQISNSTSGGSSNDNAYFGYSTPWGYFDFNRFHCHFSPRDWQRLINNNWGFRPKRLNFKLFNIQVKEVTDNNGVKTIANNLTSTVQVFTDSDYQLPYVLGSAHEGCLPPFPADVFMIPQYGYLTLNDGSQAVGRSSFYCLEYFPSQMLRTGNNFQFSYEFENVPFHSSYAHSQSLDRLMNPLIDQYLYYLSKTINGSGQNQQTLKFSVAGPSNMAVQGRNYIPGPSYRQQRVSTTVTQNNNSEIAWPGASSWALNGRNSLMNPGPAMASHKEGEDRFFPLSGSLIFGKQGTGRDNVDADKVMITNEEEIKTTNPVATESYGQVATNHQSAQAQAQTGWVQNQGILPGMVWQDRDVYLQGPIWAKIPHTYGNFHPSPLMGGFGMKHPPPQILIKNTPVPADPPTAFNKDKLNSFITQYSTGQVSVEIEWELQKENSKRWNPEIQYTSNLYKSNNVEFAVNTEGVYSEPRPIGTRYLTRNL

SEQ ID NO: 1227 - protein, 736 aa, synthetic construct
MAADGYLPDWLEDNLSEGIREWWALKPGAPQPKANQQHQDNARGLVLPGYKYLGPGNGLDKGEPINAADAAALEHDKAYDQQLKAGDNPYLKYNHADAEFQERLKEDTSFGGNLGRAVFQAKKRLLEPLGLVEEAAKTAPGKKRPVEQSPQEPDSSAGIGKSGAQPAKKRLNFGQTGDTESVPDPQPIGEPPAAPSGVGSLTMASGGGAPVADNNEGADGVGSSSGNWHCDSQWLGDRVITTSTRTWALPTYNNHLYKQISNSTSGGSSNDNAYFGYSTPWGYFDFNRFHCHFSPRDWQRLINNNWGFRPKRLNFKLFNIQVKEVTDNNGVKTIANNLTSTVQVFTDSDYQLPYVLGSAHEGCLPPFPADVFMIPQYGYLTLNDGSQAVGRSSFYCLEYFPSQMLRTGNNFQFSYEFENVPFHSSYAHSQSLDRLMNPLIDQYLYYLSKTINGSGQNQQTLKFSVAGPSNMAVQGRNYIPGPSYRQQRVSTTVTQNNNSEFAWPRASSWALNGRNSLMNPGPAMASHKEGEDRFFPLSGSLIFGKQGTGRDNVDADKVMITNEEEIKTTNPVATESYGQVATNHQSAQAQAQTGWVQNQGILPGMVWQDRDVYLQGPIWAKIPHTYGNFHPSPLMGGFGMKHPPPQILIKNTPVPADPPTAFNKDKLNSFITQYSTGQVSVEIEWELQKENSKRWNPEIQYTSNLYKSNNVEFAVNTEGVYSEPRPIGTRYLTRNL

SEQ ID NO: 1228 - protein, 736 aa, synthetic construct
MAADGYLPDWLEDNLSEGIREWWALKPGAPQPKANQQHQDNARGLVLPGYKYLGPGNGLDKGEPINAADAAALEHDKAYDQQLKAGDNPYLKYNHADAEFQERLKEDTSFGGNLGRAVFQAKKRLLEPLGLVEEAAKTAPGKKRPVEQSPQEPDSSAGIGKSGAQPAKKRLNFGQTGDTESVPDPQPIGEPPAAPSGVGSLTMASGGGAPVADNNEGADGVGSSSGNWHCDSQWLGDRVITTSTRTWALPTYNNHLYKQISNSTSGGSSNDNAYFGYSTPWGYFDFNRFHCHFSPRDWQRLINNNWGFRPKRLNFKLFNIQVKEVTDNNGVKTIANNLTSTVQVFTDSDYQLPYVLGSAHEGCLPPFPADVFMIPQYGYLTLNDGSQAVGRSSFYCLEYFPSQMLRTGNNFQFSYEFENVPFHSSYAHSQSLDRLMNPLIDQYLYYLSKTINGSGQNQQTLKFSVAGPSNMAVQGRNYIPGPSYRQQRVSTTVTQNNNSEFAWPGASSWALNGRNSLMNPGPAMASHKEGEDRFFPLSGSLIFGKQGTGRDNVDADKVMITNEEEIKTTNPVATESYGQVATNHQSAQAQAQTGWVQNQGILPGMVWQDRDVYLQGPIWAKIPHTYGNFHPSPLMGGFGMKHPPPQILIKNTPVPADPPTAFNKDKLNSFITQYSTGQVSVEIEWELQKENSKRWNPEIQYTSNLCKSNNVEFAVNTEGVYSEPRPIGTRYLTRNL

SEQ ID NO: 1229 - protein, 736 aa, synthetic construct
MAADGYLPDWLEDNLSEGIREWWALKPGAPQPKANQQHQDNARGLVLPGYKYLGPGNGLDKGEPINAADAAALEHDKAYDQQLKAGDNPYLKYNHADAEFQERLKEDTSFGGNLGRAVFQAKKRLLEPLGLVEEAAKTAPGKKRPVEQSPQEPDSSAGIGKSGAQPAKKRLNFGQTGDTESVPDPQPIGEPPAAPSGVGSLTMASGGGAPVADNNEGADGVGSSSGNWHCDSQWLGDRVITTSTRTWALPTYNNHLYKQISNSTSGGSSNDNAYFGYSTPWGYFDFNRFHCHFSPRDWQRLINNNWGFRPKRLNFKLFNIQVKEVTDNNGVKTIANNLTSTVQVFTDSDYQLPYVLGSAHEGCLPPFPADVFMIPQYGYLTLNDGSQAVGRSSFYCLEYFPSQMLRTGNNFQFSYEFENVPFHSSYAHSQSLDRLMNPLIDQYLYYLSKTINGSGQNQQTLKFSVAGPSNMAVQGRNYIPGPSYRQQRVSTTVTQNNNSEIAWPRASSWALNGRNSLMNPGPAMASHKEGEDRFFPLSGSLIFGKQGTGRDNVDADKVMITNEEEIKTTNPVATESYGQVATNHQSAQAQAQTGWVQNQGILPGMVWQDRDVYLQGPIWAKIPHTYGNFHPSPLMGGFGMKHPPPQILIKNTPVPADPPTAFNKDKLNSFITQYSTGQVSVEIEWELQKENSKRWNPEIQYTSNLYKSNNVEFAVNTEGVYSEPRPIGTRYLTRNL

SEQ ID NO: 1230 - protein, 736 aa, synthetic construct
MAADGYLPDWLEDNLSEGIREWWALKPGAPQPKANQQHQDNARGLVLPGYKYLGPGNGLDKGEPINAADAAALEHDKAYDQQLKAGDNPYLKYNHADAEFQERLKEDTSFGGNLGRAVFQAKKRLLEPLGLVEEAAKTAPGKKRPVEQSPQEPDSSAGIGKSGAQPAKKRLNFGQTGDTESVPDPQPIGEPPAAPSGVGSLTMASGGGAPVADNNEGADGVGSSSGNWHCDSQWLGDRVITTSTRTWALPTYNNHLYKQISNSTSGGSSNDNAYFGYSTPWGYFDFNRFHCHFSPRDWQRLINNNWGFRPKRLNFKLFNIQVKEVTDNNGVKTIANNLTSTVQVFTDSDYQLPYVLGSAHEGCLPPFPADVFMIPQYGYLTLNDGSQAVGRSSFYCLEYFPSQMLRTGNNFQFSYEFENVPFHSSYAHSQSLDRLMNPLIDQYLYYLSKTINGSGQNQQTLKFSVAGPSNMAVQGRNYIPGPSYRQQRVSTTVTQNNNSEIAWPGASSWALNGRNSLMNPGPAMASHKEGEDRFFPLSGSLIFGKQGTGRDNVDADKVMITNEEEIKTTNPVATESYGQVATNHQSAQAQAQTGWVQNQGILPGMVWQDRDVYLQGPIWAKIPHTYGNFHPSPLMGGFGMKHPPPQILIKNTPVPADPPTAFNKDKLNSFITQYSTGQVSVEIEWELQKENSKRWNPEIQYTSNLCKSNNVEFAVNTEGVYSEPRPIGTRYLTRNL

SEQ ID NO: 1231 - protein, 736 aa, synthetic construct
MAADGYLPDWLEDNLSEGIREWWALKPGAPQPKANQQHQDNARGLVLPGYKYLGPGNGLDKGEPINAADAAALEHDKAYDQQLKAGDNPYLKYNHADAEFQERLKEDTSFGGNLGRAVFQAKKRLLEPLGLVEEAAKTAPGKKRPVEQSPQEPDSSAGIGKSGAQPAKKRLNFGQTGDTESVPDPQPIGEPPAAPSGVGSLTMASGGGAPVADNNEGADGVGSSSGNWHCDSQWLGDRVITTSTRTWALPTYNNHLYKQISNSTSGGSSNDNAYFGYSTPWGYFDFNRFHCHFSPRDWQRLINNNWGFRPKRLNFKLFNIQVKEVTDNNGVKTIANNLTSTVQVFTDSDYQLPYVLGSAHEGCLPPFPADVFMIPQYGYLTLNDGSQAVGRSSFYCLEYFPSQMLRTGNNFQFSYEFENVPFHSSYAHSQSLDRLMNPLIDQYLYYLSKTINGSGQNQQTLKFSVAGPSNMAVQGRNYIPGPSYRQQRVSTTVTQNNNSEFAWPRASSWALNGRNSLMNPGPAMASHKEGEDRFFPLSGSLIFGKQGTGRDNVDADKVMITNEEEIKTTNPVATESYGQVATNHQSAQAQAQTGWVQNQGILPGMVWQDRDVYLQGPIWAKIPHTYGNFHPSPLMGGFGMKHPPPQILIKNTPVPADPPTAFNKDKLNSFITQYSTGQVSVEIEWELQKENSKRWNPEIQYTSNLCKSNNVEFAVNTEGVYSEPRPIGTRYLTRNL

SEQ ID NO: 1232 - protein, 736 aa, synthetic construct
MAADGYLPDWLEDNLSEGIREWWALKPGAPQPKANQQHQDNARGLVLPGYKYLGPGNGLDKGEPINAADAAALEHDKAYDQQLKAGDNPYLKYNHADAEFQERLKEDTSFGGNLGRAVFQAKKRLLEPLGLVEEAAKTAPGKKRPVEQSPQEPDSSAGIGKSGAQPAKKRLNFGQTGDTESVPDPQPIGEPPAAPSGVGSLTMASGGGAPVADNNEGADGVGSSSGNWHCDSQWLGDRVITTSTRTWALPTYNNHLYKQISNSTSGGSSNDNAYFGYSTPWGYFDFNRFHCHFSPRDWQRLINNNWGFRPKRLNFKLFNIQVKEVTDNNGVKTIANNLTSTVQVFTDSDYQLPYVLGSAHEGCLPPFPADVFMIPQYGYLTLNDGSQAVGRSSFYCLEYFPSQMLRTGNNFQFSYEFENVPFHSSYAHSQSLDRLMNPLIDQYLYYLSKTINGSGQNQQTLKFSVAGPSNMAVQGRNYIPGPSYRQQRVSTTVTQNNNSEIAWPRASSWALNGRNSLMNPGPAMASHKEGEDRFFPLSGSLIFGKQGTGRDNVDADKVMITNEEEIKTTNPVATESYGQVATNHQSAQAQAQTGWVQNQGILPGMVWQDRDVYLQGPIWAKIPHTYGNFHPSPLMGGFGMKHPPPQILIKNTPVPADPPTAFNKDKLNSFITQYSTGQVSVEIEWELQKENSKRWNPEIQYTSNLCKSNNVEFAVNTEGVYSEPRPIGTRYLTRNL

SEQ ID NO: 1233 - protein, 736 aa, synthetic construct
MAADGYLPDWLEDNLSEGIREWWALKPGAPQPKANQQHQDNARGLVLPGYKYLGPGNGLDKGEPINAADAAALEHDKAYDQQLKAGDNPYLKYNHADAEFQERLKEDTSFGGNLGRAVFQAKKRLLEPLGLVEEAAKTAPGKKRPVEQSPQEPDSSAGIGKSGAQPAKKRLNFGQTGDTESVPDPQPIGEPPAAPSGVGSLTMASGGGAPVADNNEGADGVGSSSGNWHCDSQWLGDRVITTSTRTWALPTYNNHLYKQISNSTSGGSSNDNAYFGYSTPWGYFDFNRFHCHFSPRDWQRLINNNWGFRPKRLNFKLFNIQVKEVTDNNGVKTIANNLTSTVQVFGDSDYQLPYVLGSAHEGCLPPFPADVFMIPQYGYLTLNDGSQAVGRSSFYCLEYFPSQMLRTGNNFQFSYEFENVPFHSSYAHSQSLDRLMNPLIDQYLYYLSKTINGSGQNQQTLKFSVAGPSNMAVQGRNYIPGPSYRQQRVSTTVTQNNNSEFAWPGASSWALNGRNSLMNPGPAMASHKEGEDRFFPLSGSLIFGKQGTGRDNVDADKVMITNEEEIKTTNPVATESYGQVATNHQSAQAQAQTGWVQNQGILPGMVWQDRDVYLQGPIWAKIPHTYGNFHPSPLMGGFGMKHPPPQILIKNTPVPADPPTAFNKDKLNSFITQYSTGQVSVEIEWELQKENSKRWNPEIQYTSNLYKSNNVEFAVNTEGVYSEPRPIGTRYLTRNL

SEQ ID NO: 1234 - protein, 736 aa, synthetic construct
MAADGYLPDWLEDNLSEGIREWWALKPGAPQPKANQQHQDNARGLVLPGYKYLGPGNGLDKGEPINAADAAALEHDKAYDQQLKAGDNPYLKYNHADAEFQERLKEDTSFGGNLGRAVFQAKKRLLEPLGLVEEAAKTAPGKKRPVEQSPQEPDSSAGIGKSGAQPAKKRLNFGQTGDTESVPDPQPIGEPPAAPSGVGSLTMASGGGAPVADNNEGADGVGSSSGNWHCDSQWLGDRVITTSTRTWALPTYNNHLYKQISNSTSGGSSNDNAYFGYSTPWGYFDFNRFHCHFSPRDWQRLINNNWGFRPKRLNFKLFNIQVKEVTDNNGVKTIANNLTSTVQVFGDSDYQLPYVLGSAHEGCLPPFPADVFMIPQYGYLTLNDGSQAVGRSSFYCLEYFPSQMLRTGNNFQFSYEFENVPFHSSYAHSQSLDRLMNPLIDQYLYYLSKTINGSGQNQQTLKFSVAGPSNMAVQGRNYIPGPSYRQQRVSTTVTQNNNSEIAWPGASSWALNGRNSLMNPGPAMASHKEGEDRFFPLSGSLIFGKQGTGRDNVDADKVMITNEEEIKTTNPVATESYGQVATNHQSAQAQAQTGWVQNQGILPGMVWQDRDVYLQGPIWAKIPHTYGNFHPSPLMGGFGMKHPPPQILIKNTPVPADPPTAFNKDKLNSFITQYSTGQVSVEIEWELQKENSKRWNPEIQYTSNLYKSNNVEFAVNTEGVYSEPRPIGTRYLTRNL

SEQ ID NO: 1235 - protein, 736 aa, synthetic construct
MAADGYLPDWLEDNLSEGIREWWALKPGAPQPKANQQHQDNARGLVLPGYKYLGPGNGLDKGEPINAADAAALEHDKAYDQQLKAGDNPYLKYNHADAEFQERLKEDTSFGGNLGRAVFQAKKRLLEPLGLVEEAAKTAPGKKRPVEQSPQEPDSSAGIGKSGAQPAKKRLNFGQTGDTESVPDPQPIGEPPAAPSGVGSLTMASGGGAPVADNNEGADGVGSSSGNWHCDSQWLGDRVITTSTRTWALPTYNNHLYKQISNSTSGGSSNDNAYFGYSTPWGYFDFNRFHCHFSPRDWQRLINNNWGFRPKRLNFKLFNIQVKEVTDNNGVKTIANNLTSTVQVFGDSDYQLPYVLGSAHEGCLPPFPADVFMIPQYGYLTLNDGSQAVGRSSFYCLEYFPSQMLRTGNNFQFSYEFENVPFHSSYAHSQSLDRLMNPLIDQYLYYLSKTINGSGQNQQTLKFSVAGPSNMAVQGRNYIPGPSYRQQRVSTTVTQNNNSEFAWPRASSWALNGRNSLMNPGPAMASHKEGEDRFFPLSGSLIFGKQGTGRDNVDADKVMITNEEEIKTTNPVATESYGQVATNHQSAQAQAQTGWVQNQGILPGMVWQDRDVYLQGPIWAKIPHTYGNFHPSPLMGGFGMKHPPPQILIKNTPVPADPPTAFNKDKLNSFITQYSTGQVSVEIEWELQKENSKRWNPEIQYTSNLYKSNNVEFAVNTEGVYSEPRPIGTRYLTRNL

SEQ ID NO: 1236 - protein, 736 aa, synthetic construct
MAADGYLPDWLEDNLSEGIREWWALKPGAPQPKANQQHQDNARGLVLPGYKYLGPGNGLDKGEPINAADAAALEHDKAYDQQLKAGDNPYLKYNHADAEFQERLKEDTSFGGNLGRAVFQAKKRLLEPLGLVEEAAKTAPGKKRPVEQSPQEPDSSAGIGKSGAQPAKKRLNFGQTGDTESVPDPQPIGEPPAAPSGVGSLTMASGGGAPVADNNEGADGVGSSSGNWHCDSQWLGDRVITTSTRTWALPTYNNHLYKQISNSTSGGSSNDNAYFGYSTPWGYFDFNRFHCHFSPRDWQRLINNNWGFRPKRLNFKLFNIQVKEVTDNNGVKTIANNLTSTVQVFGDSDYQLPYVLGSAHEGCLPPFPADVFMIPQYGYLTLNDGSQAVGRSSFYCLEYFPSQMLRTGNNFQFSYEFENVPFHSSYAHSQSLDRLMNPLIDQYLYYLSKTINGSGQNQQTLKFSVAGPSNMAVQGRNYIPGPSYRQQRVSTTVTQNNNSEFAWPGASSWALNGRNSLMNPGPAMASHKEGEDRFFPLSGSLIFGKQGTGRDNVDADKVMITNEEEIKTTNPVATESYGQVATNHQSAQAQAQTGWVQNQGILPGMVWQDRDVYLQGPIWAKIPHTYGNFHPSPLMGGFGMKHPPPQILIKNTPVPADPPTAFNKDKLNSFITQYSTGQVSVEIEWELQKENSKRWNPEIQYTSNLCKSNNVEFAVNTEGVYSEPRPIGTRYLTRNL

SEQ ID NO: 1237 - protein, 736 aa, synthetic construct
MAADGYLPDWLEDNLSEGIREWWALKPGAPQPKANQQHQDNARGLVLPGYKYLGPGNGLDKGEPINAADAAALEHDKAYDQQLKAGDNPYLKYNHADAEFQERLKEDTSFGGNLGRAVFQAKKRLLEPLGLVEEAAKTAPGKKRPVEQSPQEPDSSAGIGKSGAQPAKKRLNFGQTGDTESVPDPQPIGEPPAAPSGVGSLTMASGGGAPVADNNEGADGVGSSSGNWHCDSQWLGDRVITTSTRTWALPTYNNHLYKQISNSTSGGSSNDNAYFGYSTPWGYFDFNRFHCHFSPRDWQRLINNNWGFRPKRLNFKLFNIQVKEVTDNNGVKTIANNLTSTVQVFGDSDYQLPYVLGSAHEGCLPPFPADVFMIPQYGYLTLNDGSQAVGRSSFYCLEYFPSQMLRTGNNFQFSYEFENVPFHSSYAHSQSLDRLMNPLIDQYLYYLSKTINGSGQNQQTLKFSVAGPSNMAVQGRNYIPGPSYRQQRVSTTVTQNNNSEIAWPRASSWALNGRNSLMNPGPAMASHKEGEDRFFPLSGSLIFGKQGTGRDNVDADKVMITNEEEIKTTNPVATESYGQVATNHQSAQAQAQTGWVQNQGILPGMVWQDRDVYLQGPIWAKIPHTYGNFHPSPLMGGFGMKHPPPQILIKNTPVPADPPTAFNKDKLNSFITQYSTGQVSVEIEWELQKENSKRWNPEIQYTSNLYKSNNVEFAVNTEGVYSEPRPIGTRYLTRNL

SEQ ID NO: 1238 - protein, 736 aa, synthetic construct
MAADGYLPDWLEDNLSEGIREWWALKPGAPQPKANQQHQDNARGLVLPGYKYLGPGNGLDKGEPINAADAAALEHDKAYDQQLKAGDNPYLKYNHADAEFQERLKEDTSFGGNLGRAVFQAKKRLLEPLGLVEEAAKTAPGKKRPVEQSPQEPDSSAGIGKSGAQPAKKRLNFGQTGDTESVPDPQPIGEPPAAPSGVGSLTMASGGGAPVADNNEGADGVGSSSGNWHCDSQWLGDRVITTSTRTWALPTYNNHLYKQISNSTSGGSSNDNAYFGYSTPWGYFDFNRFHCHFSPRDWQRLINNNWGFRPKRLNFKLFNIQVKEVTDNNGVKTIANNLTSTVQVFGDSDYQLPYVLGSAHEGCLPPFPADVFMIPQYGYLTLNDGSQAVGRSSFYCLEYFPSQMLRTGNNFQFSYEFENVPFHSSYAHSQSLDRLMNPLIDQYLYYLSKTINGSGQNQQTLKFSVAGPSNMAVQGRNYIPGPSYRQQRVSTTVTQNNNSEIAWPGASSWALNGRNSLMNPGPAMASHKEGEDRFFPLSGSLIFGKQGTGRDNVDADKVMITNEEEIKTTNPVATESYGQVATNHQSAQAQAQTGWVQNQGILPGMVWQDRDVYLQGPIWAKIPHTYGNFHPSPLMGGFGMKHPPPQILIKNTPVPADPPTAFNKDKLNSFITQYSTGQVSVEIEWELQKENSKRWNPEIQYTSNLCKSNNVEFAVNTEGVYSEPRPIGTRYLTRNL

SEQ ID NO: 1239 - protein, 736 aa, synthetic construct
MAADGYLPDWLEDNLSEGIREWWALKPGAPQPKANQQHQDNARGLVLPGYKYLGPGNGLDKGEPINAADAAALEHDKAYDQQLKAGDNPYLKYNHADAEFQERLKEDTSFGGNLGRAVFQAKKRLLEPLGLVEEAAKTAPGKKRPVEQSPQEPDSSAGIGKSGAQPAKKRLNFGQTGDTESVPDPQPIGEPPAAPSGVGSLTMASGGGAPVADNNEGADGVGSSSGNWHCDSQWLGDRVITTSTRTWALPTYNNHLYKQISNSTSGGSSNDNAYFGYSTPWGYFDFNRFHCHFSPRDWQRLINNNWGFRPKRLNFKLFNIQVKEVTDNNGVKTIANNLTSTVQVFGDSDYQLPYVLGSAHEGCLPPFPADVFMIPQYGYLTLNDGSQAVGRSSFYCLEYFPSQMLRTGNNFQFSYEFENVPFHSSYAHSQSLDRLMNPLIDQYLYYLSKTINGSGQNQQTLKFSVAGPSNMAVQGRNYIPGPSYRQQRVSTTVTQNNNSEFAWPRASSWALNGRNSLMNPGPAMASHKEGEDRFFPLSGSLIFGKQGTGRDNVDADKVMITNEEEIKTTNPVATESYGQVATNHQSAQAQAQTGWVQNQGILPGMVWQDRDVYLQGPIWAKIPHTYGNFHPSPLMGGFGMKHPPPQILIKNTPVPADPPTAFNKDKLNSFITQYSTGQVSVEIEWELQKENSKRWNPEIQYTSNLCKSNNVEFAVNTEGVYSEPRPIGTRYLTRNL

SEQ ID NO: 1240 - protein, 736 aa, synthetic construct
MAADGYLPDWLEDNLSEGIREWWALKPGAPQPKANQQHQDNARGLVLPGYKYLGPGNGLDKGEPINAADAAALEHDKAYDQQLKAGDNPYLKYNHADAEFQERLKEDTSFGGNLGRAVFQAKKRLLEPLGLVEEAAKTAPGKKRPVEQSPQEPDSSAGIGKSGAQPAKKRLNFGQTGDTESVPDPQPIGEPPAAPSGVGSLTMASGGGAPVADNNEGADGVGSSSGNWHCDSQWLGDRVITTSTRTWALPTYNNHLYKQISNSTSGGSSNDNAYFGYSTPWGYFDFNRFHCHFSPRDWQRLINNNWGFRPKRLNFKLFNIQVKEVTDNNGVKTIANNLTSTVQVFGDSDYQLPYVLGSAHEGCLPPFPADVFMIPQYGYLTLNDGSQAVGRSSFYCLEYFPSQMLRTGNNFQFSYEFENVPFHSSYAHSQSLDRLMNPLIDQYLYYLSKTINGSGQNQQTLKFSVAGPSNMAVQGRNYIPGPSYRQQRVSTTVTQNNNSEIAWPRASSWALNGRNSLMNPGPAMASHKEGEDRFFPLSGSLIFGKQGTGRDNVDADKVMITNEEEIKTTNPVATESYGQVATNHQSAQAQAQTGWVQNQGILPGMVWQDRDVYLQGPIWAKIPHTYGNFHPSPLMGGFGMKHPPPQILIKNTPVPADPPTAFNKDKLNSFITQYSTGQVSVEIEWELQKENSKRWNPEIQYTSNLCKSNNVEFAVNTEGVYSEPRPIGTRYLTRNL

SEQ ID NO: 1241 - protein, 736 aa, synthetic construct
MAADGYLPDWLEDNLSEGIREWWALKPGAPQPKANQQHQDNARGLVLPGYKYLGPGNGLDKGEPINAADAAALEHDKAYDQQLKAGDNPYLKYNHADAEFQERLKEDTSFGGNLGRAVFQAKKRLLEPLGLVEEAAKTAPGKKRPVEQSPQEPDSSAGIGKSGAQPAKKRLNFGQTGDTESVPDPQPIGEPPAAPSGVGSLTMASGGGAPVADNNEGADGVGSSSGNWHCDSQWLGDRVITTSTRTWALPTYNNHLYKQISNSTSGGSSNDNAYFGYSTPWGYFDFNRFHCHFSPRDWQRLINNNWGFRPKRLNFKLFNIQVKEVTDNNGVKTIANNLTSTVQVFADSDYQLPYVLGSAHEGCLPPFPADVFMIPQYGYLTLNDGSQAVGRSSFYCLEYFPSQMLRTGNNFQFSYEFENVPFHSSYAHSQSLDRLMNPLIDQYLYYLSKTINGSGQNQQTLKFSVAGPSNMAVQGRNYIPGPSYRQQRVSTTVTQNNNSEFAWPGASSWALNGRNSLMNPGPAMASHKEGEDRFFPLSGSLIFGKQGTGRDNVDADKVMITNEEEIKTTNPVATESYGQVATNHQSAQAQAQTGWVQNQGILPGMVWQDRDVYLQGPIWAKIPHTYGNFHPSPLMGGFGMKHPPPQILIKNTPVPADPPTAFNKDKLNSFITQYSTGQVSVEIEWELQKENSKRWNPEIQYTSNLYKSNNVEFAVNTEGVYSEPRPIGTRYLTRNL

SEQ ID NO: 1242 - protein, 736 aa, synthetic construct
MAADGYLPDWLEDNLSEGIREWWALKPGAPQPKANQQHQDNARGLVLPGYKYLGPGNGLDKGEPINAADAAALEHDKAYDQQLKAGDNPYLKYNHADAEFQERLKEDTSFGGNLGRAVFQAKKRLLEPLGLVEEAAKTAPGKKRPVEQSPQEPDSSAGIGKSGAQPAKKRLNFGQTGDTESVPDPQPIGEPPAAPSGVGSLTMASGGGAPVADNNEGADGVGSSSGNWHCDSQWLGDRVITTSTRTWALPTYNNHLYKQISNSTSGGSSNDNAYFGYSTPWGYFDFNRFHCHFSPRDWQRLINNNWGFRPKRLNFKLFNIQVKEVTDNNGVKTIANNLTSTVQVFADSDYQLPYVLGSAHEGCLPPFPADVFMIPQYGYLTLNDGSQAVGRSSFYCLEYFPSQMLRTGNNFQFSYEFENVPFHSSYAHSQSLDRLMNPLIDQYLYYLSKTINGSGQNQQTLKFSVAGPSNMAVQGRNYIPGPSYRQQRVSTTVTQNNNSEIAWPGASSWALNGRNSLMNPGPAMASHKEGEDRFFPLSGSLIFGKQGTGRDNVDADKVMITNEEEIKTTNPVATESYGQVATNHQSAQAQAQTGWVQNQGILPGMVWQDRDVYLQGPIWAKIPHTYGNFHPSPLMGGFGMKHPPPQILIKNTPVPADPPTAFNKDKLNSFITQYSTGQVSVEIEWELQKENSKRWNPEIQYTSNLYKSNNVEFAVNTEGVYSEPRPIGTRYLTRNL

SEQ ID NO: 1243 - protein, 736 aa, synthetic construct
MAADGYLPDWLEDNLSEGIREWWALKPGAPQPKANQQHQDNARGLVLPGYKYLGPGNGLDKGEPINAADAAALEHDKAYDQQLKAGDNPYLKYNHADAEFQERLKEDTSFGGNLGRAVFQAKKRLLEPLGLVEEAAKTAPGKKRPVEQSPQEPDSSAGIGKSGAQPAKKRLNFGQTGDTESVPDPQPIGEPPAAPSGVGSLTMASGGGAPVADNNEGADGVGSSSGNWHCDSQWLGDRVITTSTRTWALPTYNNHLYKQISNSTSGGSSNDNAYFGYSTPWGYFDFNRFHCHFSPRDWQRLINNNWGFRPKRLNFKLFNIQVKEVTDNNGVKTIANNLTSTVQVFADSDYQLPYVLGSAHEGCLPPFPADVFMIPQYGYLTLNDGSQAVGRSSFYCLEYFPSQMLRTGNNFQFSYEFENVPFHSSYAHSQSLDRLMNPLIDQYLYYLSKTINGSGQNQQTLKFSVAGPSNMAVQGRNYIPGPSYRQQRVSTTVTQNNNSEFAWPRASSWALNGRNSLMNPGPAMASHKEGEDRFFPLSGSLIFGKQGTGRDNVDADKVMITNEEEIKTTNPVATESYGQVATNHQSAQAQAQTGWVQNQGILPGMVWQDRDVYLQGPIWAKIPHTYGNFHPSPLMGGFGMKHPPPQILIKNTPVPADPPTAFNKDKLNSFITQYSTGQVSVEIEWELQKENSKRWNPEIQYTSNLYKSNNVEFAVNTEGVYSEPRPIGTRYLTRNL

SEQ ID NO: 1244 - protein, 736 aa, synthetic construct
MAADGYLPDWLEDNLSEGIREWWALKPGAPQPKANQQHQDNARGLVLPGYKYLGPGNGLDKGEPINAADAAALEHDKAYDQQLKAGDNPYLKYNHADAEFQERLKEDTSFGGNLGRAVFQAKKRLLEPLGLVEEAAKTAPGKKRPVEQSPQEPDSSAGIGKSGAQPAKKRLNFGQTGDTESVPDPQPIGEPPAAPSGVGSLTMASGGGAPVADNNEGADGVGSSSGNWHCDSQWLGDRVITTSTRTWALPTYNNHLYKQISNSTSGGSSNDNAYFGYSTPWGYFDFNRFHCHFSPRDWQRLINNNWGFRPKRLNFKLFNIQVKEVTDNNGVKTIANNLTSTVQVFADSDYQLPYVLGSAHEGCLPPFPADVFMIPQYGYLTLNDGSQAVGRSSFYCLEYFPSQMLRTGNNFQFSYEFENVPFHSSYAHSQSLDRLMNPLIDQYLYYLSKTINGSGQNQQTLKFSVAGPSNMAVQGRNYIPGPSYRQQRVSTTVTQNNNSEFAWPGASSWALNGRNSLMNPGPAMASHKEGEDRFFPLSGSLIFGKQGTGRDNVDADKVMITNEEEIKTTNPVATESYGQVATNHQSAQAQAQTGWVQNQGILPGMVWQDRDVYLQGPIWAKIPHTYGNFHPSPLMGGFGMKHPPPQILIKNTPVPADPPTAFNKDKLNSFITQYSTGQVSVEIEWELQKENSKRWNPEIQYTSNLCKSNNVEFAVNTEGVYSEPRPIGTRYLTRNL

SEQ ID NO: 1245 - protein, 736 aa, synthetic construct
MAADGYLPDWLEDNLSEGIREWWALKPGAPQPKANQQHQDNARGLVLPGYKYLGPGNGLDKGEPINAADAAALEHDKAYDQQLKAGDNPYLKYNHADAEFQERLKEDTSFGGNLGRAVFQAKKRLLEPLGLVEEAAKTAPGKKRPVEQSPQEPDSSAGIGKSGAQPAKKRLNFGQTGDTESVPDPQPIGEPPAAPSGVGSLTMASGGGAPVADNNEGADGVGSSSGNWHCDSQWLGDRVITTSTRTWALPTYNNHLYKQISNSTSGGSSNDNAYFGYSTPWGYFDFNRFHCHFSPRDWQRLINNNWGFRPKRLNFKLFNIQVKEVTDNNGVKTIANNLTSTVQVFADSDYQLPYVLGSAHEGCLPPFPADVFMIPQYGYLTLNDGSQAVGRSSFYCLEYFPSQMLRTGNNFQFSYEFENVPFHSSYAHSQSLDRLMNPLIDQYLYYLSKTINGSGQNQQTLKFSVAGPSNMAVQGRNYIPGPSYRQQRVSTTVTQNNNSEIAWPRASSWALNGRNSLMNPGPAMASHKEGEDRFFPLSGSLIFGKQGTGRDNVDADKVMITNEEEIKTTNPVATESYGQVATNHQSAQAQAQTGWVQNQGILPGMVWQDRDVYLQGPIWAKIPHTYGNFHPSPLMGGFGMKHPPPQILIKNTPVPADPPTAFNKDKLNSFITQYSTGQVSVEIEWELQKENSKRWNPEIQYTSNLYKSNNVEFAVNTEGVYSEPRPIGTRYLTRNL

SEQ ID NO: 1246 - protein, 736 aa, synthetic construct
MAADGYLPDWLEDNLSEGIREWWALKPGAPQPKANQQHQDNARGLVLPGYKYLGPGNGLDKGEPINAADAAALEHDKAYDQQLKAGDNPYLKYNHADAEFQERLKEDTSFGGNLGRAVFQAKKRLLEPLGLVEEAAKTAPGKKRPVEQSPQEPDSSAGIGKSGAQPAKKRLNFGQTGDTESVPDPQPIGEPPAAPSGVGSLTMASGGGAPVADNNEGADGVGSSSGNWHCDSQWLGDRVITTSTRTWALPTYNNHLYKQISNSTSGGSSNDNAYFGYSTPWGYFDFNRFHCHFSPRDWQRLINNNWGFRPKRLNFKLFNIQVKEVTDNNGVKTIANNLTSTVQVFADSDYQLPYVLGSAHEGCLPPFPADVFMIPQYGYLTLNDGSQAVGRSSFYCLEYFPSQMLRTGNNFQFSYEFENVPFHSSYAHSQSLDRLMNPLIDQYLYYLSKTINGSGQNQQTLKFSVAGPSNMAVQGRNYIPGPSYRQQRVSTTVTQNNNSEIAWPGASSWALNGRNSLMNPGPAMASHKEGEDRFFPLSGSLIFGKQGTGRDNVDADKVMITNEEEIKTTNPVATESYGQVATNHQSAQAQAQTGWVQNQGILPGMVWQDRDVYLQGPIWAKIPHTYGNFHPSPLMGGFGMKHPPPQILIKNTPVPADPPTAFNKDKLNSFITQYSTGQVSVEIEWELQKENSKRWNPEIQYTSNLCKSNNVEFAVNTEGVYSEPRPIGTRYLTRNL

SEQ ID NO: 1247 - protein, 736 aa, synthetic construct
MAADGYLPDWLEDNLSEGIREWWALKPGAPQPKANQQHQDNARGLVLPGYKYLGPGNGLDKGEPINAADAAALEHDKAYDQQLKAGDNPYLKYNHADAEFQERLKEDTSFGGNLGRAVFQAKKRLLEPLGLVEEAAKTAPGKKRPVEQSPQEPDSSAGIGKSGAQPAKKRLNFGQTGDTESVPDPQPIGEPPAAPSGVGSLTMASGGGAPVADNNEGADGVGSSSGNWHCDSQWLGDRVITTSTRTWALPTYNNHLYKQISNSTSGGSSNDNAYFGYSTPWGYFDFNRFHCHFSPRDWQRLINNNWGFRPKRLNFKLFNIQVKEVTDNNGVKTIANNLTSTVQVFADSDYQLPYVLGSAHEGCLPPFPADVFMIPQYGYLTLNDGSQAVGRSSFYCLEYFPSQMLRTGNNFQFSYEFENVPFHSSYAHSQSLDRLMNPLIDQYLYYLSKTINGSGQNQQTLKFSVAGPSNMAVQGRNYIPGPSYRQQRVSTTVTQNNNSEFAWPRASSWALNGRNSLMNPGPAMASHKEGEDRFFPLSGSLIFGKQGTGRDNVDADKVMITNEEEIKTTNPVATESYGQVATNHQSAQAQAQTGWVQNQGILPGMVWQDRDVYLQGPIWAKIPHTYGNFHPSPLMGGFGMKHPPPQILIKNTPVPADPPTAFNKDKLNSFITQYSTGQVSVEIEWELQKENSKRWNPEIQYTSNLCKSNNVEFAVNTEGVYSEPRPIGTRYLTRNL

SEQ ID NO: 1248 - protein, 736 aa, synthetic construct
MAADGYLPDWLEDNLSEGIREWWALKPGAPQPKANQQHQDNARGLVLPGYKYLGPGNGLDKGEPINAADAAALEHDKAYDQQLKAGDNPYLKYNHADAEFQERLKEDTSFGGNLGRAVFQAKKRLLEPLGLVEEAAKTAPGKKRPVEQSPQEPDSSAGIGKSGAQPAKKRLNFGQTGDTESVPDPQPIGEPPAAPSGVGSLTMASGGGAPVADNNEGADGVGSSSGNWHCDSQWLGDRVITTSTRTWALPTYNNHLYKQISNSTSGGSSNDNAYFGYSTPWGYFDFNRFHCHFSPRDWQRLINNNWGFRPKRLNFKLFNIQVKEVTDNNGVKTIANNLTSTVQVFADSDYQLPYVLGSAHEGCLPPFPADVFMIPQYGYLTLNDGSQAVGRSSFYCLEYFPSQMLRTGNNFQFSYEFENVPFHSSYAHSQSLDRLMNPLIDQYLYYLSKTINGSGQNQQTLKFSVAGPSNMAVQGRNYIPGPSYRQQRVSTTVTQNNNSEIAWPRASSWALNGRNSLMNPGPAMASHKEGEDRFFPLSGSLIFGKQGTGRDNVDADKVMITNEEEIKTTNPVATESYGQVATNHQSAQAQAQTGWVQNQGILPGMVWQDRDVYLQGPIWAKIPHTYGNFHPSPLMGGFGMKHPPPQILIKNTPVPADPPTAFNKDKLNSFITQYSTGQVSVEIEWELQKENSKRWNPEIQYTSNLCKSNNVEFAVNTEGVYSEPRPIGTRYLTRNL

SEQ ID NO: 1249 - protein, 736 aa, synthetic construct
MAADGYLPDWLEDNLSEGIREWWALKPGAPQPKANQQHQDNARGLVLPGYKYLGPGNGLDKGEPVNAADAAALEHDKAYDQQLKAGDNPYLKYNHADAEFQERLKEDTSFGGNLGRAVFQAKKRLLEPLGLVEEAAKTAPGKKRPVEQSPQEPDSSAGIGKSGAQPAKKRLNFGQTGDTESVPDPQPIGEPPAAPSGVGSLTMASGGGAPVADNNEGADGVGSSSGNWHCDSQWLGDRVITTSTRTWALPTYNNHLYKQISNSTSGGSSNDNAYFGYSTPWGYFDFNRFHCHFSPHDWQRLINNNWGFRPKRLNFKLFNIQVKEVTDNNGVKTIANNLTSTVQVFGDSDYQLPYVLGSAHEGCLPPFPADVFMIPQYGYLTLNDGSQAVGRSSFYCLEYFPSQMLRTGNNFQFSYEFENVPFHSSYAHSQSLDRLMNPLIDQYLYYLSKTINGSGQNQQTLKFNVAGPSNMAVQGRNYIPGPSYRQQRVSTTVTQNNNSEFAWPRASSWALNGRNSLMNPGPAMASHKEGEDRFFPLSGSLIFGKQGTGRDNVDADKVMITNEEEIKTTNPVATESYGQVATNHQSAQAQAQTGWVQNQGILPGMVWQDRDVYLQGPIWAKIPHTDGNFHPSPLMGGFGMKHPPPQILIKNTPVPADPPTAFNKDKLNSFITQYSTGQVSMEIEWELQKENSKRWNPEIQYTSNYYKSNNVEFAVNTEGVYSEPRPIGTRYLTRNL

SEQ ID NO: 1250 - protein, 736 aa, synthetic construct
MAADGYLPDWLEDNLSEGIREWWALKPGAPQPKANQQHQDNARGLVLPGYKYLGPGNGLDKGEPVNAADAAALEHDKAYDQQLKAGDNPYLKYNHADAEFQERLKEDTSFGGNLGRAVFQAKKRLLEPLGLVEEAAKTAPGKKRPVEQSPQEPDSSAGIGKSGAQPAKKRLNFGQTGDTESVPDPQPIGEPPAAPSGVGSLTMASGGGAPVADNNEGADGVGSSSGNWHCDSQWLGDRVITTSTRTWALPTYNNHLYKQISNSTSGGSSNDNAYFGYSTPWGYFDFNRFHCHFSPHDWQRLINNNWGFRPKRLNFKLFNIQVKEVTDNNGVKTIANNLTSTVQVFGDSDYQLPYVLGSAHEGCLPPFPADVFMIPQYGYLTLNDGSQAVGRSSFYCLEYFPSQMLRTGNNFQFSYEFENVPFHSSYAHSQSLDRLMNPLIDQYLYYLSKTINGSGQNQQTLKFNVAGPSNMAVQGRNYIPGPSYRQQRVSTTVTQNNNSEIAWPRASSWALNGRNSLMNPGPAMASHKEGEDRFFPLSGSLIFGKQGTGRDNVDADKVMITNEEEIKTTNPVATESYGQVATNHQSAQAQAQTGWVQNQGILPGMVWQDRDVYLQGPIWAKIPHTDGNFHPSPLMGGFGMKHPPPQILIKNTPVPADPPTAFNKDKLNSFITQYSTGQVSMEIEWELQKENSKRWNPEIQYTSNYYKSNNVEFAVNTEGVYSEPRPIGTRYLTRNL

SEQ ID NO: 1251 - protein, 736 aa, synthetic construct
MAADGYLPDWLEDNLSEGIREWWALKPGAPQPKANQQHQDNARGLVLPGYKYLGPGNGLDKGEPVNAADAAALEHDKAYDQQLKAGDNPYLKYNHADAEFQERLKEDTSFGGNLGRAVFQAKKRLLEPLGLVEEAAKTAPGKKRPVEQSPQEPDSSAGIGKSGAQPAKKRLNFGQTGDTESVPDPQPIGEPPAAPSGVGSLTMASGGGAPVADNNEGADGVGSSSGNWHCDSQWLGDRVITTSTRTWALPTYNNHLYKQISNSTSGGSSNDNAYFGYSTPWGYFDFNRFHCHFSPHDWQRLINNNWGFRPKRLNFKLFNIQVKEVTDNNGVKTIANNLTSTVQVFGDSDYQLPYVLGSAHEGCLPPFPADVFMIPQYGYLTLNDGSQAVGRSSFYCLEYFPSQMLRTGNNFQFSYEFENVPFHSSYAHSQSLDRLMNPLIDQYLYYLSKTINGSGQNQQTLKFNVAGPSNMAVQGRNYIPGPSYRQQRVSTTVTQNNNSEFAWPRASSWALNGRNSLMNPGPAMASHKEGEDRFFPLSGSLIFGKQGTGRDNVDADKVMITNEEEIKTTNPVATESYGQVATNHQSAQAQAQTGWVQNQGILPGMVWQDRDVYLQGPIWAKIPHTDGNFHPSPLMGGFGMKHPPPQILIKNTPVPADPPTAFNKDKLNSFITQYSTGQVSMEIEWELQKENSKRWNPEIQYTSNYCKSNNVEFAVNTEGVYSEPRPIGTRYLTRNL

SEQ ID NO: 1252 - protein, 736 aa, synthetic construct
MAADGYLPDWLEDNLSEGIREWWALKPGAPQPKANQQHQDNARGLVLPGYKYLGPGNGLDKGEPVNAADAAALEHDKAYDQQLKAGDNPYLKYNHADAEFQERLKEDTSFGGNLGRAVFQAKKRLLEPLGLVEEAAKTAPGKKRPVEQSPQEPDSSAGIGKSGAQPAKKRLNFGQTGDTESVPDPQPIGEPPAAPSGVGSLTMASGGGAPVADNNEGADGVGSSSGNWHCDSQWLGDRVITTSTRTWALPTYNNHLYKQISNSTSGGSSNDNAYFGYSTPWGYFDFNRFHCHFSPHDWQRLINNNWGFRPKRLNFKLFNIQVKEVTDNNGVKTIANNLTSTVQVFGDSDYQLPYVLGSAHEGCLPPFPADVFMIPQYGYLTLNDGSQAVGRSSFYCLEYFPSQMLRTGNNFQFSYEFENVPFHSSYAHSQSLDRLMNPLIDQYLYYLSKTINGSGQNQQTLKFNVAGPSNMAVQGRNYIPGPSYRQQRVSTTVTQNNNSEIAWPRASSWALNGRNSLMNPGPAMASHKEGEDRFFPLSGSLIFGKQGTGRDNVDADKVMITNEEEIKTTNPVATESYGQVATNHQSAQAQAQTGWVQNQGILPGMVWQDRDVYLQGPIWAKIPHTDGNFHPSPLMGGFGMKHPPPQILIKNTPVPADPPTAFNKDKLNSFITQYSTGQVSMEIEWELQKENSKRWNPEIQYTSNYCKSNNVEFAVNTEGVYSEPRPIGTRYLTRNL

SEQ ID NO: 1253 - protein, 736 aa, synthetic construct
MAADGYLPDWLEDNLSEGIREWWALKPGAPQPKANQQHQDNARGLVLPGYKYLGPGNGLDKGEPVNAADAAALEHDKAYDQQLKAGDNPYLKYNHADAEFQERLKEDTSFGGNLGRAVFQAKKRLLEPLGLVEEAAKTAPGKKRPVEQSPQEPDSSAGIGKSGAQPAKKRLNFGQTGDTESVPDPQPIGEPPAAPSGVGSLTMASGGGAPVADNNEGADGVGSSSGNWHCDSQWLGDRVITTSTRTWALPTYNNHLYKQISNSTSGGSSNDNAYFGYSTPWGYFDFNRFHCHFSPHDWQRLINNNWGFRPKRLNFKLFNIQVKEVTDNNGVKTIANNLTSTVQVFTDSDYQLPYVLGSAHEGCLPPFPADVFMIPQYGYLTLNDGSQAVGRSSFYCLEYFPSQMLRTGNNFQFSYEFENVPFHSSYAHSQSLDRLMNPLIDQYLYYLSKTINGSGQNQQTLKFNVAGPSNMAVQGRNYIPGPSYRQQRVSTTVTQNNNSEFAWPRASSWALNGRNSLMNPGPAMASHKEGEDRFFPLSGSLIFGKQGTGRDNVDADKVMITNEEEIKTTNPVATESYGQVATNHQSAQAQAQTGWVQNQGILPGMVWQDRDVYLQGPIWAKIPHTDGNFHPSPLMGGFGMKHPPPQILIKNTPVPADPPTAFNKDKLNSFITQYSTGQVSMEIEWELQKENSKRWNPEIQYTSNLYKSNNVEFAVNTEGVYSEPRPIGTRYLTRNL

SEQ ID NO: 1254 - protein, 736 aa, synthetic construct
MAADGYLPDWLEDNLSEGIREWWALKPGAPQPKANQQHQDNARGLVLPGYKYLGPGNGLDKGEPVNAADAAALEHDKAYDQQLKAGDNPYLKYNHADAEFQERLKEDTSFGGNLGRAVFQAKKRLLEPLGLVEEAAKTAPGKKRPVEQSPQEPDSSAGIGKSGAQPAKKRLNFGQTGDTESVPDPQPIGEPPAAPSGVGSLTMASGGGAPVADNNEGADGVGSSSGNWHCDSQWLGDRVITTSTRTWALPTYNNHLYKQISNSTSGGSSNDNAYFGYSTPWGYFDFNRFHCHFSPHDWQRLINNNWGFRPKRLNFKLFNIQVKEVTDNNGVKTIANNLTSTVQVFTDSDYQLPYVLGSAHEGCLPPFPADVFMIPQYGYLTLNDGSQAVGRSSFYCLEYFPSQMLRTGNNFQFSYEFENVPFHSSYAHSQSLDRLMNPLIDQYLYYLSKTINGSGQNQQTLKFNVAGPSNMAVQGRNYIPGPSYRQQRVSTTVTQNNNSEIAWPRASSWALNGRNSLMNPGPAMASHKEGEDRFFPLSGSLIFGKQGTGRDNVDADKVMITNEEEIKTTNPVATESYGQVATNHQSAQAQAQTGWVQNQGILPGMVWQDRDVYLQGPIWAKIPHTDGNFHPSPLMGGFGMKHPPPQILIKNTPVPADPPTAFNKDKLNSFITQYSTGQVSMEIEWELQKENSKRWNPEIQYTSNLYKSNNVEFAVNTEGVYSEPRPIGTRYLTRNL

SEQ ID NO: 1255 - protein, 736 aa, synthetic construct
MAADGYLPDWLEDNLSEGIREWWALKPGAPQPKANQQHQDNARGLVLPGYKYLGPGNGLDKGEPVNAADAAALEHDKAYDQQLKAGDNPYLKYNHADAEFQERLKEDTSFGGNLGRAVFQAKKRLLEPLGLVEEAAKTAPGKKRPVEQSPQEPDSSAGIGKSGAQPAKKRLNFGQTGDTESVPDPQPIGEPPAAPSGVGSLTMASGGGAPVADNNEGADGVGSSSGNWHCDSQWLGDRVITTSTRTWALPTYNNHLYKQISNSTSGGSSNDNAYFGYSTPWGYFDFNRFHCHFSPHDWQRLINNNWGFRPKRLNFKLFNIQVKEVTDNNGVKTIANNLTSTVQVFTDSDYQLPYVLGSAHEGCLPPFPADVFMIPQYGYLTLNDGSQAVGRSSFYCLEYFPSQMLRTGNNFQFSYEFENVPFHSSYAHSQSLDRLMNPLIDQYLYYLSKTINGSGQNQQTLKFNVAGPSNMAVQGRNYIPGPSYRQQRVSTTVTQNNNSEFAWPRASSWALNGRNSLMNPGPAMASHKEGEDRFFPLSGSLIFGKQGTGRDNVDADKVMITNEEEIKTTNPVATESYGQVATNHQSAQAQAQTGWVQNQGILPGMVWQDRDVYLQGPIWAKIPHTDGNFHPSPLMGGFGMKHPPPQILIKNTPVPADPPTAFNKDKLNSFITQYSTGQVSMEIEWELQKENSKRWNPEIQYTSNLCKSNNVEFAVNTEGVYSEPRPIGTRYLTRNL

SEQ ID NO: 1256 - protein, 736 aa, synthetic construct
MAADGYLPDWLEDNLSEGIREWWALKPGAPQPKANQQHQDNARGLVLPGYKYLGPGNGLDKGEPVNAADAAALEHDKAYDQQLKAGDNPYLKYNHADAEFQERLKEDTSFGGNLGRAVFQAKKRLLEPLGLVEEAAKTAPGKKRPVEQSPQEPDSSAGIGKSGAQPAKKRLNFGQTGDTESVPDPQPIGEPPAAPSGVGSLTMASGGGAPVADNNEGADGVGSSSGNWHCDSQWLGDRVITTSTRTWALPTYNNHLYKQISNSTSGGSSNDNAYFGYSTPWGYFDFNRFHCHFSPHDWQRLINNNWGFRPKRLNFKLFNIQVKEVTDNNGVKTIANNLTSTVQVFTDSDYQLPYVLGSAHEGCLPPFPADVFMIPQYGYLTLNDGSQAVGRSSFYCLEYFPSQMLRTGNNFQFSYEFENVPFHSSYAHSQSLDRLMNPLIDQYLYYLSKTINGSGQNQQTLKFNVAGPSNMAVQGRNYIPGPSYRQQRVSTTVTQNNNSEIAWPRASSWALNGRNSLMNPGPAMASHKEGEDRFFPLSGSLIFGKQGTGRDNVDADKVMITNEEEIKTTNPVATESYGQVATNHQSAQAQAQTGWVQNQGILPGMVWQDRDVYLQGPIWAKIPHTDGNFHPSPLMGGFGMKHPPPQILIKNTPVPADPPTAFNKDKLNSFITQYSTGQVSMEIEWELQKENSKRWNPEIQYTSNLCKSNNVEFAVNTEGVYSEPRPIGTRYLTRNL

SEQ ID NO: 1257 - protein, 736 aa, synthetic construct
MAADGYLPDWLEDNLSEGIREWWALKPGAPQPKANQQHQDNARGLVLPGYKYLGPGNGLDKGEPVNAADAAALEHDKAYDQQLKAGDNPYLKYNHADAEFQERLKEDTSFGGNLGRAVFQAKKRLLEPLGLVEEAAKTAPGKKRPVEQSPQEPDSSAGIGKSGAQPAKKRLNFGQTGDTESVPDPQPIGEPPAAPSGVGSLTMASGGGAPVADNNEGADGVGSSSGNWHCDSQWLGDRVITTSTRTWALPTYNNHLYKQISNSTSGGSSNDNAYFGYSTPWGYFDFNRFHCHFSPHDWQRLINNNWGFRPKRLNFKLFNIQVKEVTDNNGVKTIANNLTSTVQVFGDSDYQLPYVLGSAHEGCLPPFPADVFMIPQYGYLTLNDGSQAVGRSSFYCLEYFPSQMLRTGNNFQFSYEFENVPFHSSYAHSQSLDRLMNPLIDQYLYYLSKTINGSGQNQQTLKFNVAGPSNMAVQGRNYIPGPSYRQQRVSTTVTQNNNSEFAWPRASSWALNGRNSLMNPGPAMASHKEGEDRFFPLSGSLIFGKQGTGRDNVDADKVMITNEEEIKTTNPVATESYGQVATNHQSAQAQAQTGWVQNQGILPGMVWQDRDVYLQGPIWAKIPHTDGNFHPSPLMGGFGMKHPPPQILIKNTPVPADPPTAFNKDKLNSFITQYSTGQVSMEIEWELQKENSKRWNPEIQYTSNLYKSNNVEFAVNTEGVYSEPRPIGTRYLTRNL

SEQ ID NO: 1258 - protein, 736 aa, synthetic construct
MAADGYLPDWLEDNLSEGIREWWALKPGAPQPKANQQHQDNARGLVLPGYKYLGPGNGLDKGEPVNAADAAALEHDKAYDQQLKAGDNPYLKYNHADAEFQERLKEDTSFGGNLGRAVFQAKKRLLEPLGLVEEAAKTAPGKKRPVEQSPQEPDSSAGIGKSGAQPAKKRLNFGQTGDTESVPDPQPIGEPPAAPSGVGSLTMASGGGAPVADNNEGADGVGSSSGNWHCDSQWLGDRVITTSTRTWALPTYNNHLYKQISNSTSGGSSNDNAYFGYSTPWGYFDFNRFHCHFSPHDWQRLINNNWGFRPKRLNFKLFNIQVKEVTDNNGVKTIANNLTSTVQVFGDSDYQLPYVLGSAHEGCLPPFPADVFMIPQYGYLTLNDGSQAVGRSSFYCLEYFPSQMLRTGNNFQFSYEFENVPFHSSYAHSQSLDRLMNPLIDQYLYYLSKTINGSGQNQQTLKFNVAGPSNMAVQGRNYIPGPSYRQQRVSTTVTQNNNSEIAWPRASSWALNGRNSLMNPGPAMASHKEGEDRFFPLSGSLIFGKQGTGRDNVDADKVMITNEEEIKTTNPVATESYGQVATNHQSAQAQAQTGWVQNQGILPGMVWQDRDVYLQGPIWAKIPHTDGNFHPSPLMGGFGMKHPPPQILIKNTPVPADPPTAFNKDKLNSFITQYSTGQVSMEIEWELQKENSKRWNPEIQYTSNLYKSNNVEFAVNTEGVYSEPRPIGTRYLTRNL

SEQ ID NO: 1259 - protein, 736 aa, synthetic construct
MAADGYLPDWLEDNLSEGIREWWALKPGAPQPKANQQHQDNARGLVLPGYKYLGPGNGLDKGEPVNAADAAALEHDKAYDQQLKAGDNPYLKYNHADAEFQERLKEDTSFGGNLGRAVFQAKKRLLEPLGLVEEAAKTAPGKKRPVEQSPQEPDSSAGIGKSGAQPAKKRLNFGQTGDTESVPDPQPIGEPPAAPSGVGSLTMASGGGAPVADNNEGADGVGSSSGNWHCDSQWLGDRVITTSTRTWALPTYNNHLYKQISNSTSGGSSNDNAYFGYSTPWGYFDFNRFHCHFSPHDWQRLINNNWGFRPKRLNFKLFNIQVKEVTDNNGVKTIANNLTSTVQVFGDSDYQLPYVLGSAHEGCLPPFPADVFMIPQYGYLTLNDGSQAVGRSSFYCLEYFPSQMLRTGNNFQFSYEFENVPFHSSYAHSQSLDRLMNPLIDQYLYYLSKTINGSGQNQQTLKFNVAGPSNMAVQGRNYIPGPSYRQQRVSTTVTQNNNSEFAWPRASSWALNGRNSLMNPGPAMASHKEGEDRFFPLSGSLIFGKQGTGRDNVDADKVMITNEEEIKTTNPVATESYGQVATNHQSAQAQAQTGWVQNQGILPGMVWQDRDVYLQGPIWAKIPHTDGNFHPSPLMGGFGMKHPPPQILIKNTPVPADPPTAFNKDKLNSFITQYSTGQVSMEIEWELQKENSKRWNPEIQYTSNLCKSNNVEFAVNTEGVYSEPRPIGTRYLTRNL

SEQ ID NO: 1260 - protein, 736 aa, synthetic construct
MAADGYLPDWLEDNLSEGIREWWALKPGAPQPKANQQHQDNARGLVLPGYKYLGPGNGLDKGEPVNAADAAALEHDKAYDQQLKAGDNPYLKYNHADAEFQERLKEDTSFGGNLGRAVFQAKKRLLEPLGLVEEAAKTAPGKKRPVEQSPQEPDSSAGIGKSGAQPAKKRLNFGQTGDTESVPDPQPIGEPPAAPSGVGSLTMASGGGAPVADNNEGADGVGSSSGNWHCDSQWLGDRVITTSTRTWALPTYNNHLYKQISNSTSGGSSNDNAYFGYSTPWGYFDFNRFHCHFSPHDWQRLINNNWGFRPKRLNFKLFNIQVKEVTDNNGVKTIANNLTSTVQVFGDSDYQLPYVLGSAHEGCLPPFPADVFMIPQYGYLTLNDGSQAVGRSSFYCLEYFPSQMLRTGNNFQFSYEFENVPFHSSYAHSQSLDRLMNPLIDQYLYYLSKTINGSGQNQQTLKFNVAGPSNMAVQGRNYIPGPSYRQQRVSTTVTQNNNSEIAWPRASSWALNGRNSLMNPGPAMASHKEGEDRFFPLSGSLIFGKQGTGRDNVDADKVMITNEEEIKTTNPVATESYGQVATNHQSAQAQAQTGWVQNQGILPGMVWQDRDVYLQGPIWAKIPHTDGNFHPSPLMGGFGMKHPPPQILIKNTPVPADPPTAFNKDKLNSFITQYSTGQVSMEIEWELQKENSKRWNPEIQYTSNLCKSNNVEFAVNTEGVYSEPRPIGTRYLTRNL

SEQ ID NO: 1261 - protein, 736 aa, synthetic construct
MAADGYLPDWLEDNLSEGIREWWALKPGAPQPKANQQHQDNARGLVLPGYKYLGPGNGLDKGEPVNAADAAALEHDKAYDQQLKAGDNPYLKYNHADAEFQERLKEDTSFGGNLGRAVFQAKKRLLEPLGLVEEAAKTAPGKKRPVEQSPQEPDSSAGIGKSGAQPAKKRLNFGQTGDTESVPDPQPIGEPPAAPSGVGSLTMASGGGAPVADNNEGADGVGSSSGNWHCDSQWLGDRVITTSTRTWALPTYNNHLYKQISNSTSGGSSNDNAYFGYSTPWGYFDFNRFHCHFSPHDWQRLINNNWGFRPKRLNFKLFNIQVKEVTDNNGVKTIANNLTSTVQVFADSDYQLPYVLGSAHEGCLPPFPADVFMIPQYGYLTLNDGSQAVGRSSFYCLEYFPSQMLRTGNNFQFSYEFENVPFHSSYAHSQSLDRLMNPLIDQYLYYLSKTINGSGQNQQTLKFNVAGPSNMAVQGRNYIPGPSYRQQRVSTTVTQNNNSEFAWPRASSWALNGRNSLMNPGPAMASHKEGEDRFFPLSGSLIFGKQGTGRDNVDADKVMITNEEEIKTTNPVATESYGQVATNHQSAQAQAQTGWVQNQGILPGMVWQDRDVYLQGPIWAKIPHTDGNFHPSPLMGGFGMKHPPPQILIKNTPVPADPPTAFNKDKLNSFITQYSTGQVSMEIEWELQKENSKRWNPEIQYTSNLYKSNNVEFAVNTEGVYSEPRPIGTRYLTRNL

SEQ ID NO: 1262 - protein, 736 aa, synthetic construct
MAADGYLPDWLEDNLSEGIREWWALKPGAPQPKANQQHQDNARGLVLPGYKYLGPGNGLDKGEPVNAADAAALEHDKAYDQQLKAGDNPYLKYNHADAEFQERLKEDTSFGGNLGRAVFQAKKRLLEPLGLVEEAAKTAPGKKRPVEQSPQEPDSSAGIGKSGAQPAKKRLNFGQTGDTESVPDPQPIGEPPAAPSGVGSLTMASGGGAPVADNNEGADGVGSSSGNWHCDSQWLGDRVITTSTRTWALPTYNNHLYKQISNSTSGGSSNDNAYFGYSTPWGYFDFNRFHCHFSPHDWQRLINNNWGFRPKRLNFKLFNIQVKEVTDNNGVKTIANNLTSTVQVFADSDYQLPYVLGSAHEGCLPPFPADVFMIPQYGYLTLNDGSQAVGRSSFYCLEYFPSQMLRTGNNFQFSYEFENVPFHSSYAHSQSLDRLMNPLIDQYLYYLSKTINGSGQNQQTLKFNVAGPSNMAVQGRNYIPGPSYRQQRVSTTVTQNNNSEIAWPRASSWALNGRNSLMNPGPAMASHKEGEDRFFPLSGSLIFGKQGTGRDNVDADKVMITNEEEIKTTNPVATESYGQVATNHQSAQAQAQTGWVQNQGILPGMVWQDRDVYLQGPIWAKIPHTDGNFHPSPLMGGFGMKHPPPQILIKNTPVPADPPTAFNKDKLNSFITQYSTGQVSMEIEWELQKENSKRWNPEIQYTSNLYKSNNVEFAVNTEGVYSEPRPIGTRYLTRNL

SEQ ID NO: 1263 - protein, 736 aa, synthetic construct
MAADGYLPDWLEDNLSEGIREWWALKPGAPQPKANQQHQDNARGLVLPGYKYLGPGNGLDKGEPVNAADAAALEHDKAYDQQLKAGDNPYLKYNHADAEFQERLKEDTSFGGNLGRAVFQAKKRLLEPLGLVEEAAKTAPGKKRPVEQSPQEPDSSAGIGKSGAQPAKKRLNFGQTGDTESVPDPQPIGEPPAAPSGVGSLTMASGGGAPVADNNEGADGVGSSSGNWHCDSQWLGDRVITTSTRTWALPTYNNHLYKQISNSTSGGSSNDNAYFGYSTPWGYFDFNRFHCHFSPHDWQRLINNNWGFRPKRLNFKLFNIQVKEVTDNNGVKTIANNLTSTVQVFADSDYQLPYVLGSAHEGCLPPFPADVFMIPQYGYLTLNDGSQAVGRSSFYCLEYFPSQMLRTGNNFQFSYEFENVPFHSSYAHSQSLDRLMNPLIDQYLYYLSKTINGSGQNQQTLKFNVAGPSNMAVQGRNYIPGPSYRQQRVSTTVTQNNNSEFAWPRASSWALNGRNSLMNPGPAMASHKEGEDRFFPLSGSLIFGKQGTGRDNVDADKVMITNEEEIKTTNPVATESYGQVATNHQSAQAQAQTGWVQNQGILPGMVWQDRDVYLQGPIWAKIPHTDGNFHPSPLMGGFGMKHPPPQILIKNTPVPADPPTAFNKDKLNSFITQYSTGQVSMEIEWELQKENSKRWNPEIQYTSNLCKSNNVEFAVNTEGVYSEPRPIGTRYLTRNL

SEQ ID NO: 1264 - protein, 736 aa, synthetic construct
MAADGYLPDWLEDNLSEGIREWWALKPGAPQPKANQQHQDNARGLVLPGYKYLGPGNGLDKGEPVNAADAAALEHDKAYDQQLKAGDNPYLKYNHADAEFQERLKEDTSFGGNLGRAVFQAKKRLLEPLGLVEEAAKTAPGKKRPVEQSPQEPDSSAGIGKSGAQPAKKRLNFGQTGDTESVPDPQPIGEPPAAPSGVGSLTMASGGGAPVADNNEGADGVGSSSGNWHCDSQWLGDRVITTSTRTWALPTYNNHLYKQISNSTSGGSSNDNAYFGYSTPWGYFDFNRFHCHFSPHDWQRLINNNWGFRPKRLNFKLFNIQVKEVTDNNGVKTIANNLTSTVQVFADSDYQLPYVLGSAHEGCLPPFPADVFMIPQYGYLTLNDGSQAVGRSSFYCLEYFPSQMLRTGNNFQFSYEFENVPFHSSYAHSQSLDRLMNPLIDQYLYYLSKTINGSGQNQQTLKFNVAGPSNMAVQGRNYIPGPSYRQQRVSTTVTQNNNSEIAWPRASSWALNGRNSLMNPGPAMASHKEGEDRFFPLSGSLIFGKQGTGRDNVDADKVMITNEEEIKTTNPVATESYGQVATNHQSAQAQAQTGWVQNQGILPGMVWQDRDVYLQGPIWAKIPHTDGNFHPSPLMGGFGMKHPPPQILIKNTPVPADPPTAFNKDKLNSFITQYSTGQVSMEIEWELQKENSKRWNPEIQYTSNLCKSNNVEFAVNTEGVYSEPRPIGTRYLTRNL

SEQ ID NO: 1265 - protein, 736 aa, synthetic construct
MAADGYLPDWLEDNLSEGIREWWALKPGAPQPKANQQHQDNARGLVLPGYKYLGPGNGLDKGEPVNAADAAALEHDKAYDQQLKAGDNPYLKYNHADAEFQERLKEDTSFGGNLGRAVFQAKKRLLEPLGLVEEAAKTAPGKKRPVEQSPQEPDSSAGIGKSGAQPAKKRLNFGQTGDTESVPDPQPIGEPPAAPSGVGSLTMASGGGAPVADNNEGADGVGSSSGNWHCDSQWLGDRVITTSTRTWALPTYNNHLYKQISNSTSGGSSNDNAYFGYSTPWGYFDFNRFHCHFSPRDWQRLINNNWGFRPKRLNFKLFNIQVKEVTDNNGVKTIANNLTSTVQVFGDSDYQLPYVLGSAHEGCLPPFPADVFMIPQYGYLTLNDGSQAVGRSSFYCLEYFPSQMLRTGNNFQFSYEFENVPFHSSYAHSQSLDRLMNPLIDQYLYYLSKTINGSGQNQQTLKFSVAGPSNMAVQGRNYIPGPSYRQQRVSTTVTQNNNSEFAWPRASSWALNGRNSLMNPGPAMASHKEGEDRFFPLSGSLIFGKQGTGRDNVDADKVMITNEEEIKTTNPVATESYGQVATNHQSAQAQAQTGWVQNQGILPGMVWQDRDVYLQGPIWAKIPHTDGNFHPSPLMGGFGMKHPPPQILIKNTPVPADPPTAFNKDKLNSFITQYSTGQVSVEIEWERQKENSKRWNPEIQYTSNYYKSNNVEFAVNTEGVYSEPRPIGTRYLTRNL

SEQ ID NO: 1266 - protein, 736 aa, synthetic construct
MAADGYLPDWLEDNLSEGIREWWALKPGAPQPKANQQHQDNARGLVLPGYKYLGPGNGLDKGEPVNAADAAALEHDKAYDQQLKAGDNPYLKYNHADAEFQERLKEDTSFGGNLGRAVFQAKKRLLEPLGLVEEAAKTAPGKKRPVEQSPQEPDSSAGIGKSGAQPAKKRLNFGQTGDTESVPDPQPIGEPPAAPSGVGSLTMASGGGAPVADNNEGADGVGSSSGNWHCDSQWLGDRVITTSTRTWALPTYNNHLYKQISNSTSGGSSNDNAYFGYSTPWGYFDFNRFHCHFSPRDWQRLINNNWGFRPKRLNFKLFNIQVKEVTDNNGVKTIANNLTSTVQVFGDSDYQLPYVLGSAHEGCLPPFPADVFMIPQYGYLTLNDGSQAVGRSSFYCLEYFPSQMLRTGNNFQFSYEFENVPFHSSYAHSQSLDRLMNPLIDQYLYYLSKTINGSGQNQQTLKFSVAGPSNMAVQGRNYIPGPSYRQQRVSTTVTQNNNSEIAWPRASSWALNGRNSLMNPGPAMASHKEGEDRFFPLSGSLIFGKQGTGRDNVDADKVMITNEEEIKTTNPVATESYGQVATNHQSAQAQAQTGWVQNQGILPGMVWQDRDVYLQGPIWAKIPHTDGNFHPSPLMGGFGMKHPPPQILIKNTPVPADPPTAFNKDKLNSFITQYSTGQVSVEIEWERQKENSKRWNPEIQYTSNYYKSNNVEFAVNTEGVYSEPRPIGTRYLTRNL

SEQ ID NO: 1267 - protein, 736 aa, synthetic construct
MAADGYLPDWLEDNLSEGIREWWALKPGAPQPKANQQHQDNARGLVLPGYKYLGPGNGLDKGEPVNAADAAALEHDKAYDQQLKAGDNPYLKYNHADAEFQERLKEDTSFGGNLGRAVFQAKKRLLEPLGLVEEAAKTAPGKKRPVEQSPQEPDSSAGIGKSGAQPAKKRLNFGQTGDTESVPDPQPIGEPPAAPSGVGSLTMASGGGAPVADNNEGADGVGSSSGNWHCDSQWLGDRVITTSTRTWALPTYNNHLYKQISNSTSGGSSNDNAYFGYSTPWGYFDFNRFHCHFSPRDWQRLINNNWGFRPKRLNFKLFNIQVKEVTDNNGVKTIANNLTSTVQVFGDSDYQLPYVLGSAHEGCLPPFPADVFMIPQYGYLTLNDGSQAVGRSSFYCLEYFPSQMLRTGNNFQFSYEFENVPFHSSYAHSQSLDRLMNPLIDQYLYYLSKTINGSGQNQQTLKFSVAGPSNMAVQGRNYIPGPSYRQQRVSTTVTQNNNSEFAWPRASSWALNGRNSLMNPGPAMASHKEGEDRFFPLSGSLIFGKQGTGRDNVDADKVMITNEEEIKTTNPVATESYGQVATNHQSAQAQAQTGWVQNQGILPGMVWQDRDVYLQGPIWAKIPHTDGNFHPSPLMGGFGMKHPPPQILIKNTPVPADPPTAFNKDKLNSFITQYSTGQVSVEIEWERQKENSKRWNPEIQYTSNYCKSNNVEFAVNTEGVYSEPRPIGTRYLTRNL

SEQ ID NO: 1268 - protein, 736 aa, synthetic construct
MAADGYLPDWLEDNLSEGIREWWALKPGAPQPKANQQHQDNARGLVLPGYKYLGPGNGLDKGEPVNAADAAALEHDKAYDQQLKAGDNPYLKYNHADAEFQERLKEDTSFGGNLGRAVFQAKKRLLEPLGLVEEAAKTAPGKKRPVEQSPQEPDSSAGIGKSGAQPAKKRLNFGQTGDTESVPDPQPIGEPPAAPSGVGSLTMASGGGAPVADNNEGADGVGSSSGNWHCDSQWLGDRVITTSTRTWALPTYNNHLYKQISNSTSGGSSNDNAYFGYSTPWGYFDFNRFHCHFSPRDWQRLINNNWGFRPKRLNFKLFNIQVKEVTDNNGVKTIANNLTSTVQVFGDSDYQLPYVLGSAHEGCLPPFPADVFMIPQYGYLTLNDGSQAVGRSSFYCLEYFPSQMLRTGNNFQFSYEFENVPFHSSYAHSQSLDRLMNPLIDQYLYYLSKTINGSGQNQQTLKFSVAGPSNMAVQGRNYIPGPSYRQQRVSTTVTQNNNSEIAWPRASSWALNGRNSLMNPGPAMASHKEGEDRFFPLSGSLIFGKQGTGRDNVDADKVMITNEEEIKTTNPVATESYGQVATNHQSAQAQAQTGWVQNQGILPGMVWQDRDVYLQGPIWAKIPHTDGNFHPSPLMGGFGMKHPPPQILIKNTPVPADPPTAFNKDKLNSFITQYSTGQVSVEIEWERQKENSKRWNPEIQYTSNYCKSNNVEFAVNTEGVYSEPRPIGTRYLTRNL

SEQ ID NO: 1269 - protein, 736 aa, synthetic construct
MAADGYLPDWLEDNLSEGIREWWALKPGAPQPKANQQHQDNARGLVLPGYKYLGPGNGLDKGEPVNAADAAALEHDKAYDQQLKAGDNPYLKYNHADAEFQERLKEDTSFGGNLGRAVFQAKKRLLEPLGLVEEAAKTAPGKKRPVEQSPQEPDSSAGIGKSGAQPAKKRLNFGQTGDTESVPDPQPIGEPPAAPSGVGSLTMASGGGAPVADNNEGADGVGSSSGNWHCDSQWLGDRVITTSTRTWALPTYNNHLYKQISNSTSGGSSNDNAYFGYSTPWGYFDFNRFHCHFSPRDWQRLINNNWGFRPKRLNFKLFNIQVKEVTDNNGVKTIANNLTSTVQVFTDSDYQLPYVLGSAHEGCLPPFPADVFMIPQYGYLTLNDGSQAVGRSSFYCLEYFPSQMLRTGNNFQFSYEFENVPFHSSYAHSQSLDRLMNPLIDQYLYYLSKTINGSGQNQQTLKFSVAGPSNMAVQGRNYIPGPSYRQQRVSTTVTQNNNSEFAWPRASSWALNGRNSLMNPGPAMASHKEGEDRFFPLSGSLIFGKQGTGRDNVDADKVMITNEEEIKTTNPVATESYGQVATNHQSAQAQAQTGWVQNQGILPGMVWQDRDVYLQGPIWAKIPHTDGNFHPSPLMGGFGMKHPPPQILIKNTPVPADPPTAFNKDKLNSFITQYSTGQVSVEIEWERQKENSKRWNPEIQYTSNLYKSNNVEFAVNTEGVYSEPRPIGTRYLTRNL

SEQ ID NO: 1270 - protein, 736 aa, synthetic construct
MAADGYLPDWLEDNLSEGIREWWALKPGAPQPKANQQHQDNARGLVLPGYKYLGPGNGLDKGEPVNAADAAALEHDKAYDQQLKAGDNPYLKYNHADAEFQERLKEDTSFGGNLGRAVFQAKKRLLEPLGLVEEAAKTAPGKKRPVEQSPQEPDSSAGIGKSGAQPAKKRLNFGQTGDTESVPDPQPIGEPPAAPSGVGSLTMASGGGAPVADNNEGADGVGSSSGNWHCDSQWLGDRVITTSTRTWALPTYNNHLYKQISNSTSGGSSNDNAYFGYSTPWGYFDFNRFHCHFSPRDWQRLINNNWGFRPKRLNFKLFNIQVKEVTDNNGVKTIANNLTSTVQVFTDSDYQLPYVLGSAHEGCLPPFPADVFMIPQYGYLTLNDGSQAVGRSSFYCLEYFPSQMLRTGNNFQFSYEFENVPFHSSYAHSQSLDRLMNPLIDQYLYYLSKTINGSGQNQQTLKFSVAGPSNMAVQGRNYIPGPSYRQQRVSTTVTQNNNSEIAWPRASSWALNGRNSLMNPGPAMASHKEGEDRFFPLSGSLIFGKQGTGRDNVDADKVMITNEEEIKTTNPVATESYGQVATNHQSAQAQAQTGWVQNQGILPGMVWQDRDVYLQGPIWAKIPHTDGNFHPSPLMGGFGMKHPPPQILIKNTPVPADPPTAFNKDKLNSFITQYSTGQVSVEIEWERQKENSKRWNPEIQYTSNLYKSNNVEFAVNTEGVYSEPRPIGTRYLTRNL

SEQ ID NO: 1271 - protein, 736 aa, synthetic construct
MAADGYLPDWLEDNLSEGIREWWALKPGAPQPKANQQHQDNARGLVLPGYKYLGPGNGLDKGEPVNAADAAALEHDKAYDQQLKAGDNPYLKYNHADAEFQERLKEDTSFGGNLGRAVFQAKKRLLEPLGLVEEAAKTAPGKKRPVEQSPQEPDSSAGIGKSGAQPAKKRLNFGQTGDTESVPDPQPIGEPPAAPSGVGSLTMASGGGAPVADNNEGADGVGSSSGNWHCDSQWLGDRVITTSTRTWALPTYNNHLYKQISNSTSGGSSNDNAYFGYSTPWGYFDFNRFHCHFSPRDWQRLINNNWGFRPKRLNFKLFNIQVKEVTDNNGVKTIANNLTSTVQVFTDSDYQLPYVLGSAHEGCLPPFPADVFMIPQYGYLTLNDGSQAVGRSSFYCLEYFPSQMLRTGNNFQFSYEFENVPFHSSYAHSQSLDRLMNPLIDQYLYYLSKTINGSGQNQQTLKFSVAGPSNMAVQGRNYIPGPSYRQQRVSTTVTQNNNSEFAWPRASSWALNGRNSLMNPGPAMASHKEGEDRFFPLSGSLIFGKQGTGRDNVDADKVMITNEEEIKTTNPVATESYGQVATNHQSAQAQAQTGWVQNQGILPGMVWQDRDVYLQGPIWAKIPHTDGNFHPSPLMGGFGMKHPPPQILIKNTPVPADPPTAFNKDKLNSFITQYSTGQVSVEIEWERQKENSKRWNPEIQYTSNLCKSNNVEFAVNTEGVYSEPRPIGTRYLTRNL

SEQ ID NO: 1272 - protein, 736 aa, synthetic construct
MAADGYLPDWLEDNLSEGIREWWALKPGAPQPKANQQHQDNARGLVLPGYKYLGPGNGLDKGEPVNAADAAALEHDKAYDQQLKAGDNPYLKYNHADAEFQERLKEDTSFGGNLGRAVFQAKKRLLEPLGLVEEAAKTAPGKKRPVEQSPQEPDSSAGIGKSGAQPAKKRLNFGQTGDTESVPDPQPIGEPPAAPSGVGSLTMASGGGAPVADNNEGADGVGSSSGNWHCDSQWLGDRVITTSTRTWALPTYNNHLYKQISNSTSGGSSNDNAYFGYSTPWGYFDFNRFHCHFSPRDWQRLINNNWGFRPKRLNFKLFNIQVKEVTDNNGVKTIANNLTSTVQVFTDSDYQLPYVLGSAHEGCLPPFPADVFMIPQYGYLTLNDGSQAVGRSSFYCLEYFPSQMLRTGNNFQFSYEFENVPFHSSYAHSQSLDRLMNPLIDQYLYYLSKTINGSGQNQQTLKFSVAGPSNMAVQGRNYIPGPSYRQQRVSTTVTQNNNSEIAWPRASSWALNGRNSLMNPGPAMASHKEGEDRFFPLSGSLIFGKQGTGRDNVDADKVMITNEEEIKTTNPVATESYGQVATNHQSAQAQAQTGWVQNQGILPGMVWQDRDVYLQGPIWAKIPHTDGNFHPSPLMGGFGMKHPPPQILIKNTPVPADPPTAFNKDKLNSFITQYSTGQVSVEIEWERQKENSKRWNPEIQYTSNLCKSNNVEFAVNTEGVYSEPRPIGTRYLTRNL

SEQ ID NO: 1273 - protein, 736 aa, synthetic construct
MAADGYLPDWLEDNLSEGIREWWALKPGAPQPKANQQHQDNARGLVLPGYKYLGPGNGLDKGEPVNAADAAALEHDKAYDQQLKAGDNPYLKYNHADAEFQERLKEDTSFGGNLGRAVFQAKKRLLEPLGLVEEAAKTAPGKKRPVEQSPQEPDSSAGIGKSGAQPAKKRLNFGQTGDTESVPDPQPIGEPPAAPSGVGSLTMASGGGAPVADNNEGADGVGSSSGNWHCDSQWLGDRVITTSTRTWALPTYNNHLYKQISNSTSGGSSNDNAYFGYSTPWGYFDFNRFHCHFSPRDWQRLINNNWGFRPKRLNFKLFNIQVKEVTDNNGVKTIANNLTSTVQVFGDSDYQLPYVLGSAHEGCLPPFPADVFMIPQYGYLTLNDGSQAVGRSSFYCLEYFPSQMLRTGNNFQFSYEFENVPFHSSYAHSQSLDRLMNPLIDQYLYYLSKTINGSGQNQQTLKFSVAGPSNMAVQGRNYIPGPSYRQQRVSTTVTQNNNSEFAWPRASSWALNGRNSLMNPGPAMASHKEGEDRFFPLSGSLIFGKQGTGRDNVDADKVMITNEEEIKTTNPVATESYGQVATNHQSAQAQAQTGWVQNQGILPGMVWQDRDVYLQGPIWAKIPHTDGNFHPSPLMGGFGMKHPPPQILIKNTPVPADPPTAFNKDKLNSFITQYSTGQVSVEIEWERQKENSKRWNPEIQYTSNLYKSNNVEFAVNTEGVYSEPRPIGTRYLTRNL

SEQ ID NO: 1274 - protein, 736 aa, synthetic construct
MAADGYLPDWLEDNLSEGIREWWALKPGAPQPKANQQHQDNARGLVLPGYKYLGPGNGLDKGEPVNAADAAALEHDKAYDQQLKAGDNPYLKYNHADAEFQERLKEDTSFGGNLGRAVFQAKKRLLEPLGLVEEAAKTAPGKKRPVEQSPQEPDSSAGIGKSGAQPAKKRLNFGQTGDTESVPDPQPIGEPPAAPSGVGSLTMASGGGAPVADNNEGADGVGSSSGNWHCDSQWLGDRVITTSTRTWALPTYNNHLYKQISNSTSGGSSNDNAYFGYSTPWGYFDFNRFHCHFSPRDWQRLINNNWGFRPKRLNFKLFNIQVKEVTDNNGVKTIANNLTSTVQVFGDSDYQLPYVLGSAHEGCLPPFPADVFMIPQYGYLTLNDGSQAVGRSSFYCLEYFPSQMLRTGNNFQFSYEFENVPFHSSYAHSQSLDRLMNPLIDQYLYYLSKTINGSGQNQQTLKFSVAGPSNMAVQGRNYIPGPSYRQQRVSTTVTQNNNSEIAWPRASSWALNGRNSLMNPGPAMASHKEGEDRFFPLSGSLIFGKQGTGRDNVDADKVMITNEEEIKTTNPVATESYGQVATNHQSAQAQAQTGWVQNQGILPGMVWQDRDVYLQGPIWAKIPHTDGNFHPSPLMGGFGMKHPPPQILIKNTPVPADPPTAFNKDKLNSFITQYSTGQVSVEIEWERQKENSKRWNPEIQYTSNLYKSNNVEFAVNTEGVYSEPRPIGTRYLTRNL

SEQ ID NO: 1275 - protein, 736 aa, synthetic construct
MAADGYLPDWLEDNLSEGIREWWALKPGAPQPKANQQHQDNARGLVLPGYKYLGPGNGLDKGEPVNAADAAALEHDKAYDQQLKAGDNPYLKYNHADAEFQERLKEDTSFGGNLGRAVFQAKKRLLEPLGLVEEAAKTAPGKKRPVEQSPQEPDSSAGIGKSGAQPAKKRLNFGQTGDTESVPDPQPIGEPPAAPSGVGSLTMASGGGAPVADNNEGADGVGSSSGNWHCDSQWLGDRVITTSTRTWALPTYNNHLYKQISNSTSGGSSNDNAYFGYSTPWGYFDFNRFHCHFSPRDWQRLINNNWGFRPKRLNFKLFNIQVKEVTDNNGVKTIANNLTSTVQVFGDSDYQLPYVLGSAHEGCLPPFPADVFMIPQYGYLTLNDGSQAVGRSSFYCLEYFPSQMLRTGNNFQFSYEFENVPFHSSYAHSQSLDRLMNPLIDQYLYYLSKTINGSGQNQQTLKFSVAGPSNMAVQGRNYIPGPSYRQQRVSTTVTQNNNSEFAWPRASSWALNGRNSLMNPGPAMASHKEGEDRFFPLSGSLIFGKQGTGRDNVDADKVMITNEEEIKTTNPVATESYGQVATNHQSAQAQAQTGWVQNQGILPGMVWQDRDVYLQGPIWAKIPHTDGNFHPSPLMGGFGMKHPPPQILIKNTPVPADPPTAFNKDKLNSFITQYSTGQVSVEIEWERQKENSKRWNPEIQYTSNLCKSNNVEFAVNTEGVYSEPRPIGTRYLTRNL

SEQ ID NO: 1276 - protein, 736 aa, synthetic construct
MAADGYLPDWLEDNLSEGIREWWALKPGAPQPKANQQHQDNARGLVLPGYKYLGPGNGLDKGEPVNAADAAALEHDKAYDQQLKAGDNPYLKYNHADAEFQERLKEDTSFGGNLGRAVFQAKKRLLEPLGLVEEAAKTAPGKKRPVEQSPQEPDSSAGIGKSGAQPAKKRLNFGQTGDTESVPDPQPIGEPPAAPSGVGSLTMASGGGAPVADNNEGADGVGSSSGNWHCDSQWLGDRVITTSTRTWALPTYNNHLYKQISNSTSGGSSNDNAYFGYSTPWGYFDFNRFHCHFSPRDWQRLINNNWGFRPKRLNFKLFNIQVKEVTDNNGVKTIANNLTSTVQVFGDSDYQLPYVLGSAHEGCLPPFPADVFMIPQYGYLTLNDGSQAVGRSSFYCLEYFPSQMLRTGNNFQFSYEFENVPFHSSYAHSQSLDRLMNPLIDQYLYYLSKTINGSGQNQQTLKFSVAGPSNMAVQGRNYIPGPSYRQQRVSTTVTQNNNSEIAWPRASSWALNGRNSLMNPGPAMASHKEGEDRFFPLSGSLIFGKQGTGRDNVDADKVMITNEEEIKTTNPVATESYGQVATNHQSAQAQAQTGWVQNQGILPGMVWQDRDVYLQGPIWAKIPHTDGNFHPSPLMGGFGMKHPPPQILIKNTPVPADPPTAFNKDKLNSFITQYSTGQVSVEIEWERQKENSKRWNPEIQYTSNLCKSNNVEFAVNTEGVYSEPRPIGTRYLTRNL

SEQ ID NO: 1277 - protein, 736 aa, synthetic construct
MAADGYLPDWLEDNLSEGIREWWALKPGAPQPKANQQHQDNARGLVLPGYKYLGPGNGLDKGEPVNAADAAALEHDKAYDQQLKAGDNPYLKYNHADAEFQERLKEDTSFGGNLGRAVFQAKKRLLEPLGLVEEAAKTAPGKKRPVEQSPQEPDSSAGIGKSGAQPAKKRLNFGQTGDTESVPDPQPIGEPPAAPSGVGSLTMASGGGAPVADNNEGADGVGSSSGNWHCDSQWLGDRVITTSTRTWALPTYNNHLYKQISNSTSGGSSNDNAYFGYSTPWGYFDFNRFHCHFSPRDWQRLINNNWGFRPKRLNFKLFNIQVKEVTDNNGVKTIANNLTSTVQVFADSDYQLPYVLGSAHEGCLPPFPADVFMIPQYGYLTLNDGSQAVGRSSFYCLEYFPSQMLRTGNNFQFSYEFENVPFHSSYAHSQSLDRLMNPLIDQYLYYLSKTINGSGQNQQTLKFSVAGPSNMAVQGRNYIPGPSYRQQRVSTTVTQNNNSEFAWPRASSWALNGRNSLMNPGPAMASHKEGEDRFFPLSGSLIFGKQGTGRDNVDADKVMITNEEEIKTTNPVATESYGQVATNHQSAQAQAQTGWVQNQGILPGMVWQDRDVYLQGPIWAKIPHTDGNFHPSPLMGGFGMKHPPPQILIKNTPVPADPPTAFNKDKLNSFITQYSTGQVSVEIEWERQKENSKRWNPEIQYTSNLYKSNNVEFAVNTEGVYSEPRPIGTRYLTRNL

SEQ ID NO: 1278 - protein, 736 aa, synthetic construct
MAADGYLPDWLEDNLSEGIREWWALKPGAPQPKANQQHQDNARGLVLPGYKYLGPGNGLDKGEPVNAADAAALEHDKAYDQQLKAGDNPYLKYNHADAEFQERLKEDTSFGGNLGRAVFQAKKRLLEPLGLVEEAAKTAPGKKRPVEQSPQEPDSSAGIGKSGAQPAKKRLNFGQTGDTESVPDPQPIGEPPAAPSGVGSLTMASGGGAPVADNNEGADGVGSSSGNWHCDSQWLGDRVITTSTRTWALPTYNNHLYKQISNSTSGGSSNDNAYFGYSTPWGYFDFNRFHCHFSPRDWQRLINNNWGFRPKRLNFKLFNIQVKEVTDNNGVKTIANNLTSTVQVFADSDYQLPYVLGSAHEGCLPPFPADVFMIPQYGYLTLNDGSQAVGRSSFYCLEYFPSQMLRTGNNFQFSYEFENVPFHSSYAHSQSLDRLMNPLIDQYLYYLSKTINGSGQNQQTLKFSVAGPSNMAVQGRNYIPGPSYRQQRVSTTVTQNNNSEIAWPRASSWALNGRNSLMNPGPAMASHKEGEDRFFPLSGSLIFGKQGTGRDNVDADKVMITNEEEIKTTNPVATESYGQVATNHQSAQAQAQTGWVQNQGILPGMVWQDRDVYLQGPIWAKIPHTDGNFHPSPLMGGFGMKHPPPQILIKNTPVPADPPTAFNKDKLNSFITQYSTGQVSVEIEWERQKENSKRWNPEIQYTSNLYKSNNVEFAVNTEGVYSEPRPIGTRYLTRNL

SEQ ID NO: 1279 - protein, 736 aa, synthetic construct
MAADGYLPDWLEDNLSEGIREWWALKPGAPQPKANQQHQDNARGLVLPGYKYLGPGNGLDKGEPVNAADAAALEHDKAYDQQLKAGDNPYLKYNHADAEFQERLKEDTSFGGNLGRAVFQAKKRLLEPLGLVEEAAKTAPGKKRPVEQSPQEPDSSAGIGKSGAQPAKKRLNFGQTGDTESVPDPQPIGEPPAAPSGVGSLTMASGGGAPVADNNEGADGVGSSSGNWHCDSQWLGDRVITTSTRTWALPTYNNHLYKQISNSTSGGSSNDNAYFGYSTPWGYFDFNRFHCHFSPRDWQRLINNNWGFRPKRLNFKLFNIQVKEVTDNNGVKTIANNLTSTVQVFADSDYQLPYVLGSAHEGCLPPFPADVFMIPQYGYLTLNDGSQAVGRSSFYCLEYFPSQMLRTGNNFQFSYEFENVPFHSSYAHSQSLDRLMNPLIDQYLYYLSKTINGSGQNQQTLKFSVAGPSNMAVQGRNYIPGPSYRQQRVSTTVTQNNNSEFAWPRASSWALNGRNSLMNPGPAMASHKEGEDRFFPLSGSLIFGKQGTGRDNVDADKVMITNEEEIKTTNPVATESYGQVATNHQSAQAQAQTGWVQNQGILPGMVWQDRDVYLQGPIWAKIPHTDGNFHPSPLMGGFGMKHPPPQILIKNTPVPADPPTAFNKDKLNSFITQYSTGQVSVEIEWERQKENSKRWNPEIQYTSNLCKSNNVEFAVNTEGVYSEPRPIGTRYLTRNL

SEQ ID NO: 1280 - protein, 736 aa, synthetic construct
MAADGYLPDWLEDNLSEGIREWWALKPGAPQPKANQQHQDNARGLVLPGYKYLGPGNGLDKGEPVNAADAAALEHDKAYDQQLKAGDNPYLKYNHADAEFQERLKEDTSFGGNLGRAVFQAKKRLLEPLGLVEEAAKTAPGKKRPVEQSPQEPDSSAGIGKSGAQPAKKRLNFGQTGDTESVPDPQPIGEPPAAPSGVGSLTMASGGGAPVADNNEGADGVGSSSGNWHCDSQWLGDRVITTSTRTWALPTYNNHLYKQISNSTSGGSSNDNAYFGYSTPWGYFDFNRFHCHFSPRDWQRLINNNWGFRPKRLNFKLFNIQVKEVTDNNGVKTIANNLTSTVQVFADSDYQLPYVLGSAHEGCLPPFPADVFMIPQYGYLTLNDGSQAVGRSSFYCLEYFPSQMLRTGNNFQFSYEFENVPFHSSYAHSQSLDRLMNPLIDQYLYYLSKTINGSGQNQQTLKFSVAGPSNMAVQGRNYIPGPSYRQQRVSTTVTQNNNSEIAWPRASSWALNGRNSLMNPGPAMASHKEGEDRFFPLSGSLIFGKQGTGRDNVDADKVMITNEEEIKTTNPVATESYGQVATNHQSAQAQAQTGWVQNQGILPGMVWQDRDVYLQGPIWAKIPHTDGNFHPSPLMGGFGMKHPPPQILIKNTPVPADPPTAFNKDKLNSFITQYSTGQVSVEIEWERQKENSKRWNPEIQYTSNLCKSNNVEFAVNTEGVYSEPRPIGTRYLTRNL

SEQ ID NO: 1281 - protein, 736 aa, synthetic construct
MAADGYLPDWLEDNLSEGIREWWALKPGAPQPKANQQHQDNARGLVLPGYKYLGPGNGLDKGEPVNAADAAALEHDKAYDQQLKAGDNPYLKYNHADAEFQERLKEDTSFGGNLGRAVFQAKKRLLEPLGLVEEAAKTAPGKKRPVEQSPQEPDSSAGIGKSGAQPAKKRLNFGQTGDTESVPDPQPIGEPPAAPSGVGSLTMASGGGAPVADNNEGADGVGSSSGNWHCDSQWLGDRVITTSTRTWALPTYNNHLYKQISNSTSGGSSNDNAYFGYSTPWGYFDFNRFHCHFSPRDWQRLINNNWGFRPKRLNFKLFNIQVKEVTDNNGVKTIANNLTSTVQVFGDSDYQLPYVLGSAHEGCLPPFPADVFMIPQYGYLTLNDGSQAVGRSSFYCLEYFPSQMLRTGNNFQFSYEFENVPFHSSYAHSQSLDRLMNPLIDQYLYYLSKTINGSGQNQQTLKFSVAGPSNMAVQGRNYIPGPSYRQQRVSTTVTQNNNSEFAWPRASSWALNGRNSLMNPGPAMASHKEGEDRFFPLSGSLIFGKQGTGRDNVDADKVMITNEEEIKTTNPVATESYGQVATNHQSAQAQAQTGWVQNQGILPGMVWQDRDVYLQGPIWAKIPHTDGNFHPSPLMGGFGMKHPPPQILIKNTPVPADPPTAFNKDKLNSFITQYSTGQVSVEIEWELQKENSKRWNPEIQYTSNYYKSNNVEFAVNTEGVYSEPRPIGTRYLTRNL

SEQ ID NO: 1282 - protein, 736 aa, synthetic construct; identical to SEQ ID NO: 648

SEQ ID NO: 1283 - protein, 736 aa, synthetic construct; identical to SEQ ID NO: 650

SEQ ID NO: 1284 - protein, 736 aa, synthetic construct; identical to SEQ ID NO: 651

SEQ ID NO: 1285 - protein, 736 aa, synthetic construct
MAADGYLPDWLEDNLSEGIREWWALKPGAPQPKANQQHQDNARGLVLPGYKYLGPGNGLDKGEPVNAADAAALEHDKAYDQQLKAGDNPYLKYNHADAEFQERLKEDTSFGGNLGRAVFQAKKRLLEPLGLVEEAAKTAPGKKRPVEQSPQEPDSSAGIGKSGAQPAKKRLNFGQTGDTESVPDPQPIGEPPAAPSGVGSLTMASGGGAPVADNNEGADGVGSSSGNWHCDSQWLGDRVITTSTRTWALPTYNNHLYKQISNSTSGGSSNDNAYFGYSTPWGYFDFNRFHCHFSPRDWQRLINNNWGFRPKRLNFKLFNIQVKEVTDNNGVKTIANNLTSTVQVFADSDYQLPYVLGSAHEGCLPPFPADVFMIPQYGYLTLNDGSQAVGRSSFYCLEYFPSQMLRTGNNFQFSYEFENVPFHSSYAHSQSLDRLMNPLIDQYLYYLSKTINGSGQNQQTLKFSVAGPSNMAVQGRNYIPGPSYRQQRVSTTVTQNNNSEFAWPRASSWALNGRNSLMNPGPAMASHKEGEDRFFPLSGSLIFGKQGTGRDNVDADKVMITNEEEIKTTNPVATESYGQVATNHQSAQAQAQTGWVQNQGILPGMVWQDRDVYLQGPIWAKIPHTDGNFHPSPLMGGFGMKHPPPQILIKNTPVPADPPTAFNKDKLNSFITQYSTGQVSVEIEWELQKENSKRWNPEIQYTSNLYKSNNVEFAVNTEGVYSEPRPIGTRYLTRNL

SEQ ID NO: 1286 - protein, 736 aa, synthetic construct; identical to SEQ ID NO: 669

SEQ ID NO: 1287 - protein, 736 aa, synthetic construct; identical to SEQ ID NO: 671

SEQ ID NO: 1288 - protein, 736 aa, synthetic construct; identical to SEQ ID NO: 672

SEQ ID NO: 1289 - protein, 736 aa, synthetic construct
MAADGYLPDWLEDNLSEGIREWWALKPGAPQPKANQQHQDNARGLVLPGYKYLGPGNGLDKGEPVNAADAAALEHDKAYDQQLKAGDNPYLKYNHADAEFQERLKEDTSFGGNLGRAVFQAKKRLLEPLGLVEEAAKTAPGKKRPVEQSPQEPDSSAGIGKSGAQPAKKRLNFGQTGDTESVPDPQPIGEPPAAPSGVGSLTMASGGGAPVADNNEGADGVGSSSGNWHCDSQWLGDRVITTSTRTWALPTYNNHLYKQISNSTSGGSSNDNAYFGYSTPWGYFDFNRFHCHFSPRDWQRLINNNWGFRPKRLNFKLFNIQVKEVTDNNGVKTIANNLTSTVQVFGDSDYQLPYVLGSAHEGCLPPFPADVFMIPQYGYLTLNDGSQAVGRSSFYCLEYFPSQMLRTGNNFQFSYEFENVPFHSSYAHSQSLDRLMNPLIDQYLYYLSKTINGSGQNQQTLKFSVAGPSNMAVQGRNYIPGPSYRQQRVSTTVTQNNNSEFAWPRASSWALNGRNSLMNPGPAMASHKEGEDRFFPLSGSLIFGKQGTGRDNVDADKVMITNEEEIKTTNPVATESYGQVATNHQSAQAQAQTGWVQNQGILPGMVWQDRDVYLQGPIWAKIPHTDGNFHPSPLMGGFGMKHPPPQILIKNTPVPADPPTAFNKDKLNSFITQYSTGQVSVEIEWELQKENSKRWNPEIQYTSNLYKSNNVEFAVNTEGVYSEPRPIGTRYLTRNL

SEQ ID NO: 1290 - protein, 736 aa, synthetic construct; identical to SEQ ID NO: 662

SEQ ID NO: 1291 - protein, 736 aa, synthetic construct; identical to SEQ ID NO: 664

SEQ ID NO: 1292 - protein, 736 aa, synthetic construct; identical to SEQ ID NO: 665

SEQ ID NO: 1293 - protein, 736 aa, synthetic construct; identical to SEQ ID NO: 1281

SEQ ID NO: 1294 - protein, 736 aa, synthetic construct; identical to SEQ ID NO: 648

SEQ ID NO: 1295 - protein, 736 aa, synthetic construct; identical to SEQ ID NO: 650

SEQ ID NO: 1296 - protein, 736 aa, synthetic construct
MAADGYLPDWLEDNLSEGIREWWALKPGAPQPKANQQHQDNARGLVLPGYKYLGPGNGLDKGEPVNAADAAALEHDKAYDQQLKAGDNPYLKYNHADAEFQERLKEDTSFGGNLGRAVFQAKKRLLEPLGLVEEAAKTAPGKKRPVEQSPQEPDSSAGIGKSGAQPAKKRLNFGQTGDTESVPDPQPIGEPPAAPSGVGSLTMASGGGAPVADNNEGADGVGSSSGNWHCDSQWLGDRVITTSTRTWALPTYNNHLYKQISNSTSGGSSNDNAYFGYSTPWGYFDFNRFHCHFSPRDWQRLINNNWGFRPKRLNFKLFNIQVKEVTDNNGVKTIANNLTSTVQVFTDSDYQLPYVLGSAHEGCLPPFPADVFMIPQYGYLTLNDGSQAVGRSSFYCLEYFPSQMLRTGNNFQFSYEFENVPFHSSYAHSQSLDRLMNPLIDQYLYYLSKTINGSGQNQQTLKFSVAGPSNMAVQGRNYIPGPSYRQQRVSTTVTQNNNSEFAWPRASSWALNGRNSLMNPGPAMASHKEGEDRFFPLSGSLIFGKQGTGRDNVDADKVMITNEEEIKTTNPVATESYGQVATNHQSAQAQAQTGWVQNQGILPGMVWQDRDVYLQGPIWAKIPHTDGNFHPSPLMGGFGMKHPPPQILIKNTPVPADPPTAFNKDKLNSFITQYSTGQVSVEIEWELQKENSKRWNPEIQYTSNLYKSNNVEFAVNTEGVYSEPRPIGTRYLTRNL

SEQ ID NO: 1297 - protein, 736 aa, synthetic construct; identical to SEQ ID NO: 655

SEQ ID NO: 1298 - protein, 736 aa, synthetic construct; identical to SEQ ID NO: 657

SEQ ID NO: 1299 - protein, 736 aa, synthetic construct; identical to SEQ ID NO: 1289

SEQ ID NO: 1300 - protein, 736 aa, synthetic construct; identical to SEQ ID NO: 662

SEQ ID NO: 1301 - protein, 736 aa, synthetic construct; identical to SEQ ID NO: 664

SEQ ID NO: 1302 - protein, 736 aa, synthetic construct; identical to SEQ ID NO: 1285

SEQ ID NO: 1303 - protein, 736 aa, synthetic construct; identical to SEQ ID NO: 669

SEQ ID NO: 1304 - protein, 736 aa, synthetic construct; identical to SEQ ID NO: 671
